(19) United States
(12) Patent Application Publication
(10) Pub. No.: US 2026/0015381 A1
(43) Pub. Date: Jan. 15, 2026

(54) COMPOSITIONS AND METHODS FOR MODIFICATION OF TARGET MOLECULES

(71) Applicant: The Regents of the University of California, Oakland, CA (US)

(72) Inventors: Matthew B. Francis, Berkeley, CA (US); Marco Jackson Lobba, Berkeley, CA (US); Johnathan Charles Maza, Berkeley, CA (US); Alan M. Marmelstein, Berkeley, CA (US); Jennifer A. Doudna, Berkeley, CA (US); Christof Fellmann, San Francisco, CA (US); Casey S. Mogilevsky, Berkeley, CA (US)

(21) Appl. No.: 19/180,828

(22) Filed: Apr. 16, 2025

Related U.S. Application Data
(62) Division of application No. 17/440,129.
(60) Provisional application No. 62/822,616, filed on Mar. 22, 2019.
(60) Provisional application No. 62/910,836, filed on Oct. 4, 2019.

(51) Int. Cl. C07K 1/107; A61K 47/54; A61K 47/64; A61K 47/65; C07K 1/113

(52) U.S. Cl. CPC C07K 1/1072; A61K 47/54; A61K 47/64; A61K 47/65; C07K 1/113

(57) ABSTRACT

The present disclosure provides a method for chemoselective modification of a target molecule. A subject method includes contacting a target molecule comprising a thiol moiety with a biomolecule comprising a reactive moiety, wherein the reactive moiety is generated by reaction of a biomolecule comprising a phenol moiety or a catechol with an enzyme capable of oxidizing the phenol or the catechol moiety. The contacting is carried out under conditions sufficient for conjugation of the target molecule to the biomolecule, thereby producing a modified target molecule. The present disclosure provides compositions comprising a subject target molecule comprising a thiol moiety, and a biomolecule comprising a phenol moiety or a catechol moiety. The present disclosure provides kits for carrying out a subject method. The present disclosure also provides modified target molecules and methods for using same.

### CROSS-REFERENCE

[0001] This application is a divisional of U.S. application Ser. No. 17/440,129 filed, Sep. 16, 2021, which claims the benefit of U.S. Provisional Patent Application No. 62/822,616, filed Mar. 22, 2019, and U.S. Provisional Patent Application No. 62/910,836, filed Oct. 4, 2019, which applications are incorporated herein by reference in their entirety.

### STATEMENT REGARDING FEDERALLY SPONSORED RESEARCH

[0002] This invention was made with government support under Grant Nos. 1059083 and 1808189 awarded by the National Science Foundation. The government has certain rights in the invention.

### INCORPORATION BY REFERENCE OF SEQUENCE LISTING XML

[0003] A Sequence Listing is provided herewith as Sequence Listing XML, “BERK-405DIV_SEQ_LIST 9-3-25” created on Sep. 3, 2025, and having a size of 1,869,092 bytes. The contents of the Sequence Listing XML are incorporated by reference herein in their entirety.

### INTRODUCTION

[0004] Coupling biomolecules to target molecules, to generate conjugates, while preserving the function of the biomolecule and the target molecule, has long been a goal of chemical biology and biopharmaceutical research. Examples of conjugates include protein-peptide conjugates for vaccine development, antibody-drug, and antibody-protein conjugates for immunotherapeutics.

[0005] While many techniques have been developed to allow for attachment of moderately sized molecules to proteins, it has been challenging to develop a simple biomolecule modification procedure that can attach proteins or biomolecules in a site-specific manner to any position on a protein's surface.

[0006] There is a need for improved target molecule modification procedures that can modify a target molecule in a simple yet site specific manner.

### SUMMARY

[0007] The present disclosure provides a method for chemoselective modification of a target molecule. A subject method includes contacting a target molecule comprising a thiol moiety with a biomolecule comprising a reactive moiety, wherein the reactive moiety is generated by reaction of a biomolecule comprising a phenol moiety or a catechol with an enzyme capable of oxidizing the phenol or the catechol moiety. The contacting is carried out under conditions sufficient for conjugation of the target molecule to the biomolecule, thereby producing a modified target molecule. The present disclosure provides compositions comprising a subject target molecule comprising a thiol moiety, and a biomolecule comprising a phenol moiety or a catechol moiety. The present disclosure provides kits for carrying out a subject method. The present disclosure also provides modified target molecules and methods for using same.

### BRIEF DESCRIPTION OF THE DRAWINGS

[0008] The invention is best understood from the following detailed description when read in conjunction with the accompanying figures. It is emphasized that, according to common practice, the various features of the figures are not to-scale. On the contrary, the dimensions of the various features are arbitrarily expanded or reduced for clarity. Included in the drawings are the following figures. It is understood that the figures, described below, are for illustration purposes only. The figures are not intended to limit the scope of the present teachings in any way.

[0009] FIG. 1A illustrates activation of phenol and catechol moieties with a tyrosinase enzyme to provide a quinone intermediate, and subsequent reaction of the quinone intermediate with potential nucleophiles.

[0010] FIG. 1B illustrates an exemplary subject chemoselective modification reaction of a target protein with solvent exposed thiol (A) with a tyrosine/phenol containing coupling partner (B) to provide a covalently bound conjugation product (C).

[0011] FIG. 2, panel A depicts ESI-TOF data showing MS2 N87C modified with alpha-endorphin peptide, as well as maleimide blocking experiments, illustrating that capping the thiols via a maleimide on the protein blocks addition via tyrosinase catalyzed reaction, and that where tyrosinase is performed first this also blocks the reaction of maleimide. This Figure demonstrates that the surface cysteines are the residues being modified. FIG. 2, panel B depicts stability studies for protein-peptide conjugates under various conditions. All samples were stored in 50 mM phosphate buffer at the stated conditions.

[0012] FIG. 3 illustrates exemplary examples of biomolecules comprising a phenol moiety compatible in the subject methods.

[0013] FIG. 4 illustrates ESI-TOF data showing coupling of various peptides to cysteine-containing mutants of the MS2 viral capsid. The peptides consisted of the following sequences with acylated N-termini: 2NLS: Ac-YGPKKKRKVGGSPKKKRKV (SEQ ID NO: 943); IL13: Ac-GYACGEMGWVRCGGSK (SEQ ID NO: 944); R8: Ac-YGRRRRRRRR (SEQ ID NO: 945); and HIV-Tat: Ac-YGRKKRRQRRRPPQ (SEQ ID NO: 946).

[0014] FIG. 5, panel A illustrates ESI-TOF data showing Cas9 (C80, C574) is modified twice by endorphin. FIG. 5, panel B depicts an in vitro DNA cleavage assay, demonstrating that Cas9 (RNP) modified with peptide (End) retains cleavage activity even if modified prior to addition to guide RNA (apo). For each treatment RNP was added across a concentration gradient to determine activity on target DNA strands. FIG. 5, panel C illustrates ESI-TOF data showing successful Cas9-GFP conjugation. The sequences are set forth as follows: GYGGS (SEQ ID NO: 1021), MYGGS (SEQ ID NO: 1022). FIG. 5, panel D depicts an in vitro cleavage assay, showing that Cas9 modified with GFP retains activity compared to controls. The sequences are set forth as follows: MYGGS (SEQ ID NO: 1022), SGGGGY (SEQ ID NO: 1040).

[0015] FIG. 6 illustrates that Cas9 modified by peptides containing two copies of the SV40 nuclear localization sequence were able to enter and edit neural progenitor cells, allowing for a 20-fold increase in editing efficiency.

[0016] FIG. 7 illustrates ESI-TOF data showing modification of a phenol containing protein with small molecule thiols.

[0017] FIGS. 8 and 9 provide mushroom tyrosinase amino acid sequences. The sequence of FIG. 8 is set forth in SEQ ID NO: 971. The sequence of FIG. 9 is set forth in SEQ ID NO: 972.

[0018] FIGS. 10A-10Z and 10AA-10VV provide Bacillus megaterium tyrosinase amino acid sequences. The sequences of FIGS. 10A-10Z are set forth in SEQ ID NOs: 973-998. The sequences of FIGS. 10AA-10VV are set forth in SEQ ID NOs: 999-1020.

[0019] FIG. 11 illustrates an abTYR-Peptide Charge Screen: 5-Mer tyrosine containing peptides were coupled to Y182C GFP and pAF MS2 using abTYR. The resulting reaction mixture was analyzed using Q-TOF Mass Spectrometry. Reaction Conditions: 50M μM GFP, 250 μM Peptide, 0.167 μM Tyrosinase, 10 mM Buffer pH 6.5, 30 Min @RT, all reactions were quenched with 10 mM tropolone. The sequences are set forth as follows: GGGGY (SEQ ID NO: 1024), RGGGY (SEQ ID NO: 1025), RGRGY (SEQ ID NO: 1026), RRRGY (SEQ ID NO: 1027), RRRRY (SEQ ID NO: 1028), EGGGY (SEQ ID NO: 1029), EGEGY (SEQ ID NO: 1030), EEEGY (SEQ ID NO: 1031), EEEEY (SEQ ID NO: 1032), GGGWY (SEQ ID NO: 1033), GGWGY (SEQ ID NO: 1034), RRRWY (SEQ ID NO: 1035), RRWRY (SEQ ID NO: 1036), EEEWY (SEQ ID NO: 1037), EEWEY (SEQ ID NO: 1038).

[0020] FIGS. 12A-12B illustrate abTYR and bmTYR models: abTYR (a) has an overall negative charge (red residues) around its active site due to the abundance of glutamate and aspartate residues. In contrast bmTYR (b) has a slight positive charge (blue residues) around its active site.

[0021] FIG. 13 illustrates a bmTYR Charge Screen: 5-Mer tyrosine containing peptides were coupled to Y182C GFP using bmTYR. The resulting reaction mixture was analyzed using Q-TOF Mass Spectrometry, indicating that bmTYR prefers negatively charged substrates. Reaction Conditions: 50M μM GFP, 250 μM Peptide, 0.2 μM Tyrosinase, 10 mM Buffer pH 6.5, 30 Min at 37 Celsius, all reactions were quenched with 10 mM tropolone. The sequences are set forth as follows: GGGGY (SEQ ID NO: 1024), GGGWY (SEQ ID NO: 1033), EEEGY (SEQ ID NO: 1031), RRRGY (SEQ ID NO: 1027).

[0022] FIG. 14 illustrates a comparison between abTYR and bmTYR with respect to the EGGGY (SEQ ID NO: 1029) and EEEEY (SEQ ID NO: 1032) peptides. Reaction Conditions (abTYR): 50M M GFP, 250 μM Peptide, 0.167 μM Tyrosinase, 10 mM Buffer pH 6.5, 30 Min at RT. Reaction Conditions(bmTYR): 10M M GFP, 50 μM Peptide, 0.8 μM Tyrosinase, 10 mM Buffer pH 6.5, 1H at RT, all reactions were quenched with 10 mM tropolone.

[0023] FIG. 15A-15C show oxidative coupling strategies for protein modification. a) Chemical and physical methods of accessing o-quinones and o-iminoquinones for coupling to N-terminal proline residues and aminophenyl groups. b) Tyrosinase-mediated oxidation of phenols for coupling to N-terminal proline residues. c) Tyrosine-tagging proteins for selective tyrosinase-mediated generation of o-quinones at protein N or C termini followed by coupling with exogenous amine nucleophiles.

[0024] FIG. 16A-16B show attachment of Tyr containing peptides to p-aminophenylalanine-containing MS2 (pAF-MS2). N-Ac-α-endorphin has an accessible tyrosine residue at its N-terminus. This site can be oxidized by tyrosinase and coupled to pAF-MS2 capsids, which contain aniline groups introduced using the Schultz amber codon suppression method. The sequences are set forth as follows: GGFMTSEKSQTPLVT (SEQ ID NO: 1039) (b) The positions of the 180 aniline groups are shown in pink on the full viral capsid (PDB ID: 2MS2). EST-TOF MS analysis showed virtually complete conversion to the expected product (expected: 15589 Da). No overmodification was observed,

[0025] FIG. 17A-17E show efficiency of A. bisporus tyrosinase-mediated coupling with amine nucleophiles a) The C-terminally -GGY tagged Trastuzumab scFv was used as a model coupling partner. b) Crystal structure of Trastuzumab heavy and light chain variable domains that make up the scFv. c) Representative mass spectra of starting scFv-GGY before and after coupling with 150 μM Aniline. d) 4-Aminophenyl-derived nucleophiles were screened at concentrations from M to 750 μM. e) Pyrrolidine and Piperazine-derived nucleophiles were screened at concentrations from 100 μM to 5000 μM. Conversion was approximated via integration of TOF-LCMS. See Supporting Figure X for representative spectra.

[0026] FIG. 18 shows tyrosine-tagged protein substrates successfully coupled using A. bisporus tyrosinase. C-termini are highlighted in red and internal tyrosine residues in orange. Reactions were performed with tyrosinase, and aniline in phosphate buffer at pH 6.5. a) N-terminally Tagged Ubiquitin. b) C-terminally -(GGGGS)₂GGY-tagged sfGFP. (SEQ ID NO: 947) c) C-terminally-GGY-tagged Trastuzumab scFv. The sequences are set forth as follows: SGGGGY (SEQ ID NO: 1040).

[0027] FIG. 19A-19C show flow cytometry study of fluorophore-coupled Trastuzumab scFv binding SKBR3 (HER2+) cells. a) Oxidative coupling of GGY-tagged scFv with 12 U/L A. bisporus Tyrosinase and 50 μM Aniline-Oregon Green 488. b) ESI TOF-MS indicates that scFv-GGY was coupled with 85% conversion. A non-tagged version of the scFv was unmodified.

[0028] FIG. 20A-20B show an exploration of C-terminal linkers and utility of B. megaterium tyrosinase. a) A variety of types and lengths of linkers were appended to the C-terminus of protein L, including two that utilized the natural inter-domain linker sequence of domains 4 and 5. Protein L-variants were subject to the standard coupling reaction with B. megaterium tyrosinase. The sequence is set forth in SEQ ID NO: 1041. b) Conversion observed by TOF-LCMS after treatment with B. megaterium tyrosinase. None of the variants could be modified by A. bisporus tyrosinase. The sequences are set forth as follows: (G₄S)₂GGY (SEQ ID NO: 947), (G₄S)₃GGY (SEQ ID NO: 1042), A(EAAAK)₂AGGY (SEQ ID NO: 1043), (AP)₃GGY (SEQ ID NO: 1044), AN₂₀GGY (SEQ ID NO: 1045), EIKRTGGY (SEQ ID NO: 1046), G₄SGGY (SEQ ID NO: 968).

[0029] FIG. 21A-21C show B. megaterium-mediated oxidative coupling of C-terminally tyrosine-tagged MBP. a) Crystal structure of MBP with C-terminus highlighted in red. Tyrosine residues in orange. Bound maltose in yellow. b) data with MBP-SSGGGGY (SEQ ID NO: 948); c) data with MBP-GGY.

[0030] FIG. 22A-22D show the detection of HER2+ cells using a protein-L—O.G. 488 conjugate “Secondary” affinity reagent. a) Detection scheme: non-tyrosine tagged trastuzumab scFv binds to HER2+SK-BR-3 cell and is recognized by O.G. 488-modified protein-L. b) Secondary affinity reagent was made from -AN20GGY terminated protein-L variant using 25 μM O.G. 488-Aniline, with B. megaterium tyrosinase. c) Mass spectra of the Protein-L-AN20GGY before and after modification. d) Flow cytometry fluorescence data of SK-BR-3 cells treated according to the scheme above and negative controls. MDA-MB-468 cells were used as the HER2− control. The sequences are set forth as follows: AN₂₀GGY (SEQ ID NO: 1045).

[0031] FIG. 23 shows a C-Terminally -GGY tyrosine-tagged and non-tagged Trastuzumab scFv subjected to oxidative coupling conditions. 12 U/mL abTYR, 150 μM Aniline, 20 mM sodium phosphate buffer, pH 6.5, 1 hour.

[0032] FIG. 24A-24D show a variation of abTyr and Aniline concentration on conversion of -GGY tagged Trastuzumab scFv. a) Reaction scheme b) Representative mass spectra: 1000 μM Aniline with variable abTYR concentration c) Tabulated % conversion of Trastuzumab (“Tras.”) scFv-GGY to Aniline-coupled product. d) Graphical representation of conversion of Tras. scFv-GGY to Aniline-coupled product.

[0033] FIG. 25 shows a late nucleophile addition experiment. Aniline was added to the abTYR mediated oxidative coupling 5, 10, 20, 40, or 60 minutes after the tyrosinase enzyme.

[0034] FIG. 26 shows a representative spectra of oxidative coupling reactions with 4-Aminophenyl derived, nucleophiles. a) o-Toluidine, b) 2,6-Dimethylanaline, c) 4-Aminophenyl-N-methylamide.

[0035] FIG. 27 shows representative spectra of oxidative coupling reactions.

[0036] FIG. 28 shows oxidative coupling reactions of Protein L variants. The sequences are set forth as follows: (G₄S)₂GGY (SEQ ID NO: 947); (G₄S)₃GGY (SEQ IDNO: 1042), A(EAAAK)₂AGGY (SEQ ID NO: 1043), (AP)₃GGY (SEQ ID NO: 1044).

[0037] FIG. 29A-29B show a stability study of Trastuzumab scFv-GGY in protein storage buffer (20 mM Na₂HPO₄, 150 mM NaCl, with 15% glycerol, pH 7.4) plus 10 mM dithiothreitol (DTT), stored at 4° C. TOF-LCMS spectra in each column were from the same aliquot of protein sampled at the indicated timepoints. Disulfide-reduced scFv-GGY for the uncoupled and coupled proteins have calculated masses of 26,337.2 Da and 26,442.2 Da respectively. Aniline coupled+reduced+DTT=26,594.45 Da a) Subject to abTYR mediated oxidative coupling with Aniline. b) Not subject to the oxidative coupling reaction.

[0038] FIG. 30A-30B show a stability study of Trastuzumab scFv-GGY in protein storage buffer (20 mM Na2HPO4, 150 mM NaCl, with 15% glycerol, pH 7.4), stored at 4° C. TOF-LCMS spectra in each column were from the same aliquot of protein sampled at the indicated timepoints. Disulfide-reduced scFv-GGY for the uncoupled and coupled proteins have calculated masses of 26,337.2 Da and 26,442.2 Da respectively. a) Subject to abTYR mediated oxidative coupling with aniline and exchanged into protein storage buffer. b) Not subject to the oxidative coupling reaction.

[0039] FIG. 31A-31B show a stability study of Trastuzumab scFv-GGY in protein storage buffer (20 mM Na₂HPO₄, 150 mM NaCl, with 15% glycerol, pH 7.4) plus 10 mM Glutathione, stored at 4° C. TOF-LCMS spectra in each column were from the same aliquot of protein sampled at the indicated timepoints. Disulfide-reduced scFv-GGY for the uncoupled and coupled proteins have calculated masses of 26,337.2 Da and 26,442.2 Da respectively. Aniline coupled+reduced+1× Glutathione=26,747.58 Da; Aniline coupled+reduced+2× Glutathione=27,052.89 Da a) Subject to abTYR mediated oxidative coupling with Aniline. b) Not subject to the oxidative coupling reaction.

[0040] FIG. 32 shows a study of thiol exchange in oxidative coupling reaction product. Trastuzumab scFv-GGY was exchanged into protein storage buffer (20 mM Na₂HPO₄, 150 mM NaCl, with 15% glycerol, pH 7.4) plus 10 mM Glutathione, and stored at 4° C. After 24 hours, a portion of the sample was submitted to TOF-LCMS analysis, and the remainder was exchanged into protein storage buffer plus 10 mM DTT and stored at 4° C. for an additional 24 hours. A second sample was then submitted to TOF-LCMS analysis.

[0041] FIG. 33 shows the average mass of protein constructs. The sequences are set forth as follows:

(SEQ ID NO: 968)
GGGGSGGY;
(SEQ ID NO: 947)
(GGGGS)₂GGY;
(SEQ ID NO: 1061)
(AP)₄GGY;
(SEQ ID NO: 1045)
AN₂₀GGY,
(SEQ ID NO: 948)
SSGGGGY,
(SEQ ID NO: 1042)
(GGGGS)₃GGY,
(SEQ ID NO: 1043)
AEAAAKEAAAKAGGY,
(SEQ ID NO: 1044)
(AP)₃GGY,
(SEQ ID NO: 1046)
EIKRTGGY,
(SEQ ID NO: 968)
GGGGSGGY.

[0042] FIGS. 34A-34E provides the amino acid sequences for protein constructs. The sequences of FIGS. 34A-34E are set forth in SEQ ID NOs: 1049-1052.

[0043] FIG. 35 depicts use of a D55K mutant of Bacillus megaterium tyrosinase (bmTYR) to couple phenol-labeled nucleic acid to a cysteine-containing protein.

[0044] FIG. 36A-36C depict coupling of nucleic acids to polypeptides using methods of the present disclosure.

[0045] FIG. 37A-37C depict the impact of various mutations to bmTYR on its preference for charged substrates.

[0046] FIG. 38 depicts lack of activity of abTYR on activating a negatively charged substrate.

[0047] FIG. 39A-39G schematically depict concatenation of proteins using a method of the present disclosure.

[0048] FIG. 40A-40C depict stability of target molecule-biomolecule conjugates in human serum.

[0049] FIG. 41 depicts coupling of Cas9 to: i) an Ig Fc polypeptide; ii) and to a nanobody, using a method of the present disclosure.

[0050] FIG. 42 depicts time-of-flight mass-spectroscopy data for a Cas9-nanobody conjugate.

[0051] FIG. 43A-43B depict: i) a method for the direct labeling of live mammalian cell surfaces (FIG. 43A); and ii) coupling of a polypeptide to a cell surface, using a method of the present disclosure.

[0052] FIG. 44A-44B depict reactions in which a target molecule includes two thiol moieties.

### DEFINITIONS

[0053] Before the present invention is further described, it is to be understood that this invention is not limited to particular embodiments described, as such may, of course, vary. It is also to be understood that the terminology used herein is for the purpose of describing particular embodiments only, and is not intended to be limiting, since the scope of the present invention will be limited only by the appended claims.

[0054] Where a range of values is provided, it is understood that each intervening value, to the tenth of the unit of the lower limit unless the context clearly dictates otherwise, between the upper and lower limit of that range and any other stated or intervening value in that stated range, is encompassed within the invention. The upper and lower limits of these smaller ranges may independently be included in the smaller ranges, and are also encompassed within the invention, subject to any specifically excluded limit in the stated range. Where the stated range includes one or both of the limits, ranges excluding either or both of those included limits are also included in the invention.

[0055] Unless defined otherwise, all technical and scientific terms used herein have the same meaning as commonly understood by one of ordinary skill in the art to which this invention belongs. Although any methods and materials similar or equivalent to those described herein can also be used in the practice or testing of the present invention, the preferred methods and materials are now described. All publications mentioned herein are incorporated herein by reference to disclose and describe the methods and/or materials in connection with which the publications are cited.

[0056] It must be noted that as used herein and in the appended claims, the singular forms “a,” “an,” and “the” include plural referents unless the context clearly dictates otherwise. Thus, for example, reference to “a thiol group” includes a plurality of such thiol groups and reference to “the thiol group” includes reference to one or more thiol groups and equivalents thereof known to those skilled in the art, and so forth. It is further noted that the claims may be drafted to exclude any optional element. As such, this statement is intended to serve as antecedent basis for use of such exclusive terminology as “solely,” “only” and the like in connection with the recitation of claim elements, or use of a “negative” limitation.

[0057] It is appreciated that certain features of the invention, which are, for clarity, described in the context of separate embodiments, may also be provided in combination in a single embodiment. Conversely, various features of the invention, which are, for brevity, described in the context of a single embodiment, may also be provided separately or in any suitable sub-combination. All combinations of the embodiments pertaining to the invention are specifically embraced by the present invention and are disclosed herein just as if each and every combination was individually and explicitly disclosed. In addition, all sub-combinations of the various embodiments and elements thereof are also specifically embraced by the present invention and are disclosed herein just as if each and every such sub-combination was individually and explicitly disclosed herein.

[0058] The publications discussed herein are provided solely for their disclosure prior to the filing date of the present application. Nothing herein is to be construed as an admission that the present invention is not entitled to antedate such publication by virtue of prior invention. Further, the dates of publication provided may be different from the actual publication dates which may need to be independently confirmed.

[0059] As used herein, the term “affinity tag” refers to a member of a specific binding pair, i.e. two molecules where one of the molecules through chemical or physical means specifically binds to the other molecule. The complementary member of the affinity tag may be immobilized (e.g., to a chromatography support, a bead or a planar surface) to produce an affinity chromatography support that specifically binds the affinity tag. Tagging a compound of interest with an affinity tag allows the compound to be separated from a mixture of untagged compounds by affinity, e.g., using affinity chromatography. Examples of specific binding pairs include biotin and streptavidin (or avidin), and antigen and antibody, although binding pairs, e.g., nucleic acid hybrids, polyhistidine and nickel, and azido and alkynyl (e.g., cyclooctynyl) or phosphino groups are also envisioned. The specific binding pairs may include analogs, derivatives and fragments of the original specific binding members.

[0060] As used herein, the term “biotin moiety” refers to an affinity tag that includes biotin or a biotin analogue such as desthiobiotin, oxybiotin, 2′-iminobiotin, diaminobiotin, biotin sulfoxide, biocytin, etc. Biotin moieties bind to streptavidin with an affinity of at least 10⁻⁸ M. A biotin moiety may also include a linker, e.g., -LC-biotin, -LC-LC-Biotin, -SLC-Biotin or -PEGₙ₁-Biotin where n¹ is 3-12.

[0061] By “linking” or “linker” as in “linking group,” “linker moiety,” etc., is meant a linking moiety that connects two groups via covalent bonds. The linker may be linear, branched, cyclic or a single atom. Examples of such linking groups include alkyl, alkenylene, alkynylene, arylene, alkarylene, aralkylene, and linking moieties containing functional groups including, without limitation: amido (—NH—CO—), ureylene (—NH—CO—NH—), imide (—CO—NH—CO—), epoxy (—O—), epithio (—S—), epidioxy (—O—O—), epidithio (—S—S—), carbonyldioxy (—O—CO—O—), alkyldioxy (—O—(CH2)n-O—), epoxyimino (—O—NH—), epimino (—NH—), carbonyl (—CO—), etc. In certain cases, one, two, three, four or five or more carbon atoms of a linker backbone may be optionally substituted with a sulfur, nitrogen or oxygen heteroatom. The bonds between backbone atoms may be saturated or unsaturated, usually not more than one, two, or three unsaturated bonds will be present in a linker backbone. The linker may include one or more substituent groups, for example with an alkyl, aryl or alkenyl group. A linker may include, without limitations, poly(ethylene glycol) unit(s) (e.g., —(CH₂—CH₂—O)—); ethers, thioethers, amines, alkyls (e.g., (C₁-C₁₂)alkyl), which may be straight or branched, e.g., methyl, ethyl, n-propyl, 1-methylethyl (iso-propyl), n-butyl, n-pentyl, 1,1-dimethylethyl (t-butyl), and the like. The linker backbone may include a cyclic group, for example, an aryl, a heterocycle or a cycloalkyl group, where 2 or more atoms, e.g., 2, 3 or 4 atoms, of the cyclic group are included in the backbone. A linker may be cleavable or non-cleavable. Any convenient orientation and/or connections of the linkers to the linked groups may be used.

[0062] “Alkyl” refers to monovalent saturated aliphatic hydrocarbyl groups having from 1 to 10 carbon atoms, e.g., from 1 to 6 carbon atoms. This term includes, by way of example, linear and branched hydrocarbyl groups such as methyl (CH₃—), ethyl (CH₃CH₂—), n-propyl (CH₃CH₂CH₂—), isopropyl ((CH₃)₂CH—), n-butyl (CH₃CH₂CH₂CH₂—), isobutyl ((CH₃)₂CHCH₂—), sec-butyl ((CH₃)(CH₃CH₂)CH—), t-butyl ((CH₃)₃C—), n-pentyl (CH₃CH₂CH₂CH₂CH₂—), and neopentyl ((CH₃)₃CCH₂—).

[0063] The term “substituted alkyl” refers to an alkyl group as defined herein wherein one or more carbon atoms in the alkyl chain (except the C₁ carbon atom) have been optionally replaced with a heteroatom such as —O—, —N—, —S—, —S(O)ₙ₂— (where n² is 0 to 2), —NR— (where R is hydrogen or alkyl) and having from 1 to 5 substituents selected from the group consisting of alkoxy, substituted alkoxy, cycloalkyl, substituted cycloalkyl, cycloalkenyl, substituted cycloalkenyl, acyl, acylamino, acyloxy, amino, aminoacyl, aminoacyloxy, oxyaminoacyl, azido, cyano, halogen, hydroxyl, oxo, thioketo, carboxyl, carboxylalkyl, thioaryloxy, thioheteroaryloxy, thioheterocyclooxy, thiol, thioalkoxy, substituted thioalkoxy, aryl, aryloxy, heteroaryl, heteroaryloxy, heterocyclyl, heterocyclooxy, hydroxyamino, alkoxyamino, nitro, —SO-alkyl, —SO-aryl, —SO-heteroaryl, —SO₂-alkyl, —SO₂-aryl, —SO₂-heteroaryl, and —NR^{a}R^{b}, wherein R′ and R″ may be the same or different and are chosen from hydrogen, optionally substituted alkyl, cycloalkyl, alkenyl, cycloalkenyl, alkynyl, aryl, heteroaryl and heterocyclic.

[0064] “Aryl” or “Ar” refers to a monovalent aromatic carbocyclic group of from 6 to 18 carbon atoms having a single ring (such as is present in a phenyl group) or a ring system having multiple condensed rings (examples of such aromatic ring systems include naphthyl, anthryl and indanyl) which condensed rings may or may not be aromatic, provided that the point of attachment is through an atom of an aromatic ring. This term includes, by way of example, phenyl and naphthyl. Unless otherwise constrained by the definition for the aryl substituent, such aryl groups can optionally be substituted with from 1 to 5 substituents, or from 1 to 3 substituents, selected from acyloxy, hydroxy, thiol, acyl, alkyl, alkoxy, alkenyl, alkynyl, cycloalkyl, cycloalkenyl, substituted alkyl, substituted alkoxy, substituted alkenyl, substituted alkynyl, substituted cycloalkyl, substituted cycloalkenyl, amino, substituted amino, aminoacyl, acylamino, alkaryl, aryl, aryloxy, azido, carboxyl, carboxylalkyl, cyano, halogen, nitro, heteroaryl, heteroaryloxy, heterocyclyl, heterocyclooxy, aminoacyloxy, oxyacylamino, thioalkoxy, substituted thioalkoxy, thioaryloxy, thioheteroaryloxy, —SO-alkyl, —SO-substituted alkyl, —SO-aryl, —SO-heteroaryl, —SO₂-alkyl, —SO₂-substituted alkyl, —SO₂-aryl, —SO₂-heteroaryl and trihalomethyl.

[0065] “Amino” refers to the group —NH₂.

[0066] The term “substituted amino” refers to the group —NRR where each R is independently selected from the group consisting of hydrogen, alkyl, substituted alkyl, cycloalkyl, substituted cycloalkyl, alkenyl, substituted alkenyl, cycloalkenyl, substituted cycloalkenyl, alkynyl, substituted alkynyl, aryl, heteroaryl, and heterocyclyl provided that at least one R is not hydrogen.

[0067] In addition to the disclosure herein, the term “substituted,” when used to modify a specified group or radical, can also mean that one or more hydrogen atoms of the specified group or radical are each, independently of one another, replaced with the same or different substituent groups as defined below.

[0068] In addition to the groups disclosed with respect to the individual terms herein, substituent groups for substituting for one or more hydrogens (any two hydrogens on a single carbon can be replaced with ═O, ═NR⁷⁰, ═N—OR⁷⁰, ═N₂ or ═S) on saturated carbon atoms in the specified group or radical are, unless otherwise specified, —R⁶⁰, halo, ═O, —OR⁷⁰, —SR⁷⁰, —NR⁸⁰R⁸⁰, trihalomethyl, —CN, —OCN, —SCN, —NO, —NO₂, ═N₂, —N₃, —SO₂R⁷⁰, —SO₂O⁻M⁺, —SO₂OR⁷⁰, —OSO₂R⁷⁰, —OSO₂O⁻M⁺, —OSO₂OR⁷⁰, —P(O)(O⁻)₂(M⁺)₂, —P(O)(OR⁷⁰)O⁻M⁺, —P(O)(OR⁷⁰)₂, —C(O)R⁷⁰, —C(S)R⁷⁰, —C(NR⁷⁰)R⁷⁰, —C(O)O⁻M⁺, —C(O)OR⁷⁰, —C(S)OR⁷⁰, —C(O)NR⁸⁰R⁸⁰, —C(NR⁷⁰)NR⁸OR⁸⁰, —OC(O)R⁷⁰, —OC(S)R⁷⁰, —OC(O)O⁻M⁺, —OC(O)OR⁷⁰, —OC(S)OR⁷⁰, —NR⁷⁰C(O)R⁷⁰, —NR⁷⁰C(S)R⁷⁰, —NR⁷⁰CO₂ M⁺, —NR⁷⁰CO₂R⁷⁰, —NR⁷⁰C(S)OR⁷⁰, —NR⁷⁰C(O)NR⁸OR⁸⁰, —NR⁷⁰C(NR⁷⁰)R⁷⁰ and —NR⁷⁰C(NR⁷⁰)NR⁸OR⁸⁰, where R⁶⁰ is selected from the group consisting of optionally substituted alkyl, cycloalkyl, heteroalkyl, heterocycloalkylalkyl, cycloalkylalkyl, aryl, arylalkyl, heteroaryl and heteroarylalkyl, each R⁷⁰ is independently hydrogen or R⁶⁰; each R⁸⁰ is independently R⁷⁰ or alternatively, two R⁸⁰'s, taken together with the nitrogen atom to which they are bonded, form a 5-, 6- or 7-membered heterocycloalkyl which may optionally include from 1 to 4 of the same or different additional heteroatoms selected from the group consisting of O, N and S, of which N may have —H or C₁-C₃ alkyl substitution; and each M⁺is a counter ion with a net single positive charge. Each M⁺ may independently be, for example, an alkali ion, such as K⁺, Na⁺, Li⁺; an ammonium ion, such as ⁺N(R⁶⁰)₄; or an alkaline earth ion, such as [Ca²⁺]_{0.5}, [Mg²⁺]_{0.5}, or [Ba²⁺]_{0.5} (“subscript 0.5 means that one of the counter ions for such divalent alkali earth ions can be an ionized form of a compound of the invention and the other a typical counter ion such as chloride, or two ionized compounds disclosed herein can serve as counter ions for such divalent alkali earth ions, or a doubly ionized compound of the invention can serve as the counter ion for such divalent alkali earth ions). As specific examples, —NR⁸⁰R⁸⁰ is meant to include —NH₂, —NH-alkyl, N-pyrrolidinyl, N-piperazinyl, 4N-methyl-piperazin-1-yl and N-morpholinyl.

[0069] In addition to the disclosure herein, substituent groups for hydrogens on unsaturated carbon atoms in “substituted” alkene, alkyne, aryl and heteroaryl groups are, unless otherwise specified, —R⁶⁰, halo, —O⁻M⁺, —OR⁷⁰, —SR⁷⁰,—S⁻M⁺, —NR⁸⁰R⁸⁰, trihalomethyl, —CF₃, —CN, —OCN, —SCN, —NO, —NO₂, —N₃, —SO₂R⁷⁰,—SO₃M⁺, —SO₃R⁷⁰, —OSO₂R⁷⁰, —OSO₃ M⁺, —OSO₃R⁷⁰, —PO₃⁻²(M⁺)₂, —P(O)(OR⁷⁰)O⁻M⁺, —P(O)(OR⁷⁰)₂, —C(O)R⁷⁰, —C(S)R⁷⁰, —C(NR⁷⁰)R⁷⁰, —CO₂ M⁺, —CO₂R⁷⁰, —C(S)OR⁷⁰, —C(O)NR⁸⁰R⁸⁰, —C(NR⁷⁰)NR⁸⁰R⁸⁰, —OC(O)R⁷⁰, —OC(S)R⁷⁰, —OCO₂ M⁺, —OCO₂R⁷⁰, —OC(S)OR⁷⁰, —NR⁷⁰C(O)R⁷⁰, —NR⁷⁰C(S)R⁷⁰, —NR⁷⁰CO₂ M⁺, —NR⁷⁰CO₂R⁷⁰, —NR⁷⁰C(S)OR⁷⁰, —NR⁷⁰C(O)NR⁸OR⁸⁰, —NR⁷⁰C(NR⁷⁰)R⁷⁰ and —NR⁷⁰C(NR⁷⁰)NR⁸⁰R⁸⁰, where R⁶⁰, R⁷⁰, R⁸⁰ and M⁺ are as previously defined, provided that in case of substituted alkene or alkyne, the substituents are not—O⁻M⁺, —OR⁷⁰, —SR⁷⁰, or —S⁻M⁺.

[0070] In addition to the groups disclosed with respect to the individual terms herein, substituent groups for hydrogens on nitrogen atoms in “substituted” heteroalkyl and cycloheteroalkyl groups are, unless otherwise specified, —R⁶⁰, —O⁻M⁺, —OR⁷⁰, —SR⁷⁰,—S⁻M⁺, —NR⁸⁰R⁸⁰, trihalomethyl, —CF₃, —CN, —NO, —NO₂, —S(O)₂R⁷⁰, —S(O)₂O⁻M⁺, —S(O)₂OR⁷⁰, —OS(O)₂R⁷⁰, —OS(O)₂O⁻M⁺, —OS(O)₂OR⁷⁰, —P(O)(O⁻)₂(M⁺)₂, —P(O)(OR⁷⁰)O⁻M⁺, —P(O)(OR⁷⁰)(OR⁷⁰), —C(O)R⁷⁰, —C(S)R⁷⁰, —C(NR⁷⁰)R⁷⁰, —C(O)OR⁷⁰, —C(S)OR⁷⁰, —C(O)NR⁸⁰R⁸⁰, —C(NR⁷⁰)NR⁸⁰R⁸⁰, —OC(O)R⁷⁰, —OC(S)R⁷⁰, —OC(O)OR⁷⁰, —OC(S)OR⁷⁰, —NR⁷⁰C(O)R⁷⁰, —NR⁷⁰C(S)R⁷⁰, —NR⁷⁰C(O)OR⁷⁰, —NR⁷⁰C(S)OR⁷⁰, —NR⁷⁰C(O)NR⁸OR⁸⁰, —NR⁷⁰C(NR⁷⁰)R⁷⁰ and —NR⁷⁰C(NR⁷⁰)NR⁸⁰R⁸⁰, where R⁶⁰, R⁷⁰, R⁸⁰ and M⁺ are as previously defined.

[0071] In addition to the disclosure herein, in a certain embodiment, a group that is substituted has 1, 2, 3, or 4 substituents, 1, 2, or 3 substituents, 1 or 2 substituents, or 1 substituent.

[0072] It is understood that in all substituted groups defined above, polymers arrived at by defining substituents with further substituents to themselves (e.g., substituted aryl having a substituted aryl group as a substituent which is itself substituted with a substituted aryl group, which is further substituted by a substituted aryl group, etc.) are not intended for inclusion herein. In such cases, the maximum number of such substitutions is three. For example, serial substitutions of substituted aryl groups specifically contemplated herein are limited to substituted aryl-(substituted aryl)-substituted aryl.

[0073] As to any of the groups disclosed herein which contain one or more substituents, it is understood, of course, that such groups do not contain any substitution or substitution patterns which are sterically impractical and/or synthetically non-feasible. In addition, the subject compounds include all stereochemical isomers arising from the substitution of these compounds.

[0074] In certain embodiments, a substituent may contribute to optical isomerism and/or stereo isomerism of a compound. Salts, solvates, hydrates, and prodrug forms of a compound are also of interest. All such forms are embraced by the present disclosure. Thus the compounds described herein include salts, solvates, hydrates, prodrug and isomer forms thereof, including the pharmaceutically acceptable salts, solvates, hydrates, prodrugs and isomers thereof. In certain embodiments, a compound may be a metabolized into a pharmaceutically active derivative.

[0075] Unless otherwise specified, reference to an atom is meant to include isotopes of that atom. For example, reference to H is meant to include ¹H, ²H (i.e., D) and ³H (i.e., T), and reference to C is meant to include ¹²C and all isotopes of carbon (such as ³C).

[0076] As used herein, the term “cleavable linker” or “cleavably linked” refers to a linker or a linkage that is selectively breakable using a stimulus (e.g., a physical, chemical or enzymatic stimulus) that leaves the moieties to which the linkages joins intact. Several cleavable linkages have been described in the literature (e.g., Brown (1997) Contemporary Organic Synthesis 4(3); 216-237). And Guillier et al (Chem. Rev. 2000 1000:2091-2157). A disulfide bond (which can be broken by DDT) and a photo-cleavable linker are examples of cleavable linkages.

[0077] The term “fluorophore” refers to any molecular entity that is capable of absorbing energy of a first wavelength and re-emit energy at a different second wavelength. In certain embodiments, the subject biomolecule includes a fluorophore attached to one end of the biomolecule or at a central position. In some embodiments, the fluorophore may be attached to one end of the biomolecule. The fluorophore attached to the biomolecule need not be a single molecule, but may include multiple molecules.

[0078] The fluorophore may be synthetic or biological in nature, as known to those of skill in the art. More generally, any fluorophore can be used that is stable under coupling conditions and that can be sufficiently suppressed when in close proximity to the quencher such that a significant change in the intensity of fluorescence of the fluorophore is detectable in response to target specifically binding the probe. Examples of suitable fluorophores include, but are not limited to Oregon Green 488 dye, rhodamine and rhodamine derivatives, fluorescein isothiocyanate, fluorescein, 6-carboxyfluorescein (6-FAM), coumarin and coumarin derivatives, cyanine and cyanine derivatives, Alexa Fluors, DyLight Fluors, and the like.

[0079] In certain embodiments, the biomolecule includes a metal-chelating agent. A “chelate” as used herein in reference to a complex between a metal and a chelating ligand, refers to a combination of a metallic ion bonded to one or more ligands to form a heterocyclic ring structure. Chelate formation through neutralization of the positive charge(s) of the metal ion may be through the formation of ionic, covalent or coordinate covalent bonding. In certain embodiments, the metal-chelating agent is includes, but are not limited to, 1,4,7,10-Tetraazacyclododecane-1,4,7,10-tetraacetic acid (also referred to as, DOTA, or tetraxetan).

[0080] The terms “polynucleotide” and “nucleic acid,” used interchangeably herein, refer to a polymeric form of nucleotides of any length, either ribonucleotides or deoxyribonucleotides. Thus, this term includes, but is not limited to, single-, double-, or multi-stranded DNA or RNA, genomic DNA, cDNA, DNA-RNA hybrids, or a polymer comprising purine and pyrimidine bases or other natural, chemically or biochemically modified, non-natural, or derivatized nucleotide bases.

[0081] The terms “polypeptide” and “protein”, used interchangeably herein, refer to a polymeric form of amino acids of any length, which can include coded and non-coded amino acids, chemically or biochemically modified or derivatized amino acids, and polypeptides having modified peptide backbones. The term “fusion protein” or grammatical equivalents thereof is meant to include a protein composed of a plurality of polypeptide components, that while typically unjoined in their native state, typically are joined by their respective amino and carboxyl termini through a peptide linkage to form a single continuous polypeptide. Fusion proteins may be a combination of two, three or even four or more different proteins.

[0082] In general, polypeptides may be of any length, e.g., 2 or greater amino acids, greater than 4 amino acids, greater than about 10 amino acids, greater than about 20 amino acids, greater than about 50 amino acids, greater than about 100 amino acids, greater than about 300 amino acids, usually up to about 500 or 1000 or more amino acids. “Peptides” are generally 2 or greater amino acids in length, such as greater than 4 amino acids, greater than about 10 amino acids, greater than about 20 amino acids, usually up to about 50 amino acids. In some embodiments, peptides are between 2 and 30 amino acids in length.

[0083] As used herein, the term “a target protein” refers to all members of the target family, and fragments and enantiomers thereof, and protein mimics thereof. The target proteins of interest that are described herein are intended to include all members of the target family, and fragments and enantiomers thereof, and protein mimics thereof, unless explicitly described otherwise. The target protein may be any protein of interest, such as a therapeutic or diagnostic target, including but not limited to: hormones, growth factors, receptors, enzymes, cytokines, osteoinductive factors, colony stimulating factors and immunoglobulins. The term “target protein” is intended to include recombinant and synthetic molecules, which can be prepared using any convenient recombinant expression methods or using any convenient synthetic methods, or purchased commercially, as well as fusion proteins containing a target molecule.

[0084] The term “physiological conditions” is meant to encompass those conditions compatible with living cells, e.g., predominantly aqueous conditions of a temperature, pH, salinity, etc. that are compatible with living cells.

[0085] “Solid support”, “support”, and “solid phase support” are used interchangeably and refer to a material or group of materials having a rigid or semi-rigid surface or surfaces. In many embodiments, at least one surface of the solid support will be substantially flat, although in some embodiments it may be desirable to physically separate synthesis regions for different compounds with, for example, wells, raised regions, pins, etched trenches, or the like. According to other embodiments, the solid support(s) will take the form of beads, resins, gels, microspheres, or other geometric configurations.

[0086] The terms “antibodies” and “immunoglobulin” include antibodies or immunoglobulins of any isotype, fragments of antibodies that retain specific binding to antigen, including, but not limited to, Fab, Fv, scFv, and Fd fragments, chimeric antibodies, humanized antibodies, single-chain antibodies (scAb), single domain antibodies (dAb), single domain heavy chain antibodies, a single domain light chain antibodies, nanobodies, bi-specific antibodies, multi-specific antibodies, and fusion proteins comprising an antigen-binding (also referred to herein as antigen binding) portion of an antibody and a non-antibody protein. The antibodies can be detectably labeled, e.g., with a radioisotope, an enzyme that generates a detectable product, a fluorescent protein, and the like. The antibodies can be further conjugated to other moieties, such as members of specific binding pairs, e.g., biotin (member of biotin-avidin specific binding pair), and the like. The antibodies can also be bound to a solid support, including, but not limited to, polystyrene plates or beads, and the like. Also encompassed by the term are Fab′, Fv, F(ab′)₂, and or other antibody fragments that retain specific binding to antigen, and monoclonal antibodies. As used herein, a monoclonal antibody is an antibody produced by a group of identical cells, all of which were produced from a single cell by repetitive cellular replication. That is, the clone of cells only produces a single antibody species. While a monoclonal antibody can be produced using hybridoma production technology, other production methods known to those skilled in the art can also be used (e.g., antibodies derived from antibody phage display libraries). An antibody can be monovalent or bivalent. An antibody can be an Ig monomer, which is a “Y-shaped” molecule that consists of four polypeptide chains: two heavy chains and two light chains connected by disulfide bonds.

[0087] The term “humanized immunoglobulin” as used herein refers to an immunoglobulin comprising portions of immunoglobulins of different origin, wherein at least one portion comprises amino acid sequences of human origin. For example, the humanized antibody can comprise portions derived from an immunoglobulin of nonhuman origin with the requisite specificity, such as a mouse, and from immunoglobulin sequences of human origin (e.g., chimeric immunoglobulin), joined together chemically by conventional techniques (e.g., synthetic) or prepared as a contiguous polypeptide using genetic engineering techniques (e.g., DNA encoding the protein portions of the chimeric antibody can be expressed to produce a contiguous polypeptide chain). Another example of a humanized immunoglobulin is an immunoglobulin containing one or more immunoglobulin chains comprising a complementarity-determining region (CDR) derived from an antibody of nonhuman origin and a framework region derived from a light and/or heavy chain of human origin (e.g., CDR-grafted antibodies with or without framework changes). Chimeric or CDR-grafted single chain antibodies are also encompassed by the term humanized immunoglobulin. See, e.g., Cabilly et al., U.S. Pat. No. 4,816,567; Cabilly et al., European Patent No. 0,125,023 B1; Boss et al., U.S. Pat. No. 4,816,397; Boss et al., European Patent No. 0,120,694 B1; Neuberger, M. S. et al., WO 86/01533; Neuberger, M. S. et al., European Patent No. 0,194,276 B1; Winter, U.S. Pat. No. 5,225,539; Winter, European Patent No. 0,239,400 B1; Padlan, E. A. et al., European Patent Application No. 0,519,596 A1. See also, Ladner et al., U.S. Pat. No. 4,946,778; Huston, U.S. Pat. No. 5,476,786; and Bird, R. E. et al., Science, 242: 423-426 (1988)), regarding single chain antibodies.

[0088] The term “nanobody” (Nb), as used herein, refers to the smallest antigen binding fragment or single variable domain (V_{HH}) derived from naturally occurring heavy chain antibody and is known to the person skilled in the art. They are derived from heavy chain only antibodies, seen in camelids (Hamers-Casterman et al., (1993) Nature 363:446; Desmyter et al., (1996) Nature Struct. Biol. 3:803). In the family of “camelids” immunoglobulins devoid of light polypeptide chains are found. “Camelids” comprise old world camelids (Camelus bactrianus and Camelus dromedarius) and new world camelids (for example, Llama paccos, Llama glama, Llama guanicoe and Llama vicugna). A single variable domain heavy chain antibody is referred to herein as a nanobody or a V_{HH} antibody.

[0089] “Antibody fragments” comprise a portion of an intact antibody, for example, the antigen binding or variable region of the intact antibody. Examples of antibody fragments include Fab, Fab′, F(ab′)₂, and Fv fragments; diabodies; linear antibodies (Zapata et al., Protein Eng. 8(10): 1057-1062 (1995)); domain antibodies (dAb; Holt et al. (2003) Trends Biotechnol. 21:484); single-chain antibody molecules; and multi-specific antibodies formed from antibody fragments. Papain digestion of antibodies produces two identical antigen-binding fragments, called “Fab” fragments, each with a single antigen-binding site, and a residual “Fc” fragment, a designation reflecting the ability to crystallize readily. Pepsin treatment yields an F(ab′)₂ fragment that has two antigen combining sites and is still capable of cross-linking antigen.

[0090] “Fv” is the minimum antibody fragment that contains a complete antigen-recognition and -binding site. This region consists of a dimer of one heavy- and one light-chain variable domain in tight, non-covalent association. It is in this configuration that the three CDRS of each variable domain interact to define an antigen-binding site on the surface of the V_{H}-V_{L} dimer. Collectively, the six CDRs confer antigen-binding specificity to the antibody. However, even a single variable domain (or half of an Fv comprising only three CDRs specific for an antigen) has the ability to recognize and bind antigen, although at a lower affinity than the entire binding site.

[0091] The “Fab” fragment also contains the constant domain of the light chain and the first constant domain (CH₁) of the heavy chain. Fab fragments differ from Fab′ fragments by the addition of a few residues at the carboxyl terminus of the heavy chain C_{H} domain including one or more cysteines from the antibody hinge region. Fab′-SH is the designation herein for Fab′ in which the cysteine residue(s) of the constant domains bear a free thiol group. F(ab′)₂ antibody fragments originally were produced as pairs of Fab′ fragments which have hinge cysteines between them. Other chemical couplings of antibody fragments are also known.

[0092] The “light chains” of antibodies (immunoglobulins) from any vertebrate species can be assigned to one of two clearly distinct types, called kappa and lambda, based on the amino acid sequences of their constant domains. Depending on the amino acid sequence of the constant domain of their heavy chains, immunoglobulins can be assigned to different classes. There are five major classes of immunoglobulins: IgA, IgD, IgE, IgG, and IgM, and several of these classes can be further divided into subclasses (isotypes), e.g., IgG1, IgG2, IgG3, IgG4, IgA, and IgA2. The subclasses can be further divided into types, e.g., IgG2a and IgG2b.

[0093] “Single-chain Fv” or “sFv” or “scFv” antibody fragments comprise the V_{H} and V_{L} domains of antibody, wherein these domains are present in a single polypeptide chain. In some embodiments, the Fv polypeptide further comprises a polypeptide linker between the V_{H} and V_{L}domains, which enables the sFv to form the desired structure for antigen binding. For a review of sFv, see Pluckthun in The Pharmacology of Monoclonal Antibodies, vol. 113, Rosenburg and Moore eds., Springer-Verlag, New York, pp. 269-315 (1994).

[0094] The term “diabodies” refers to small antibody fragments with two antigen-binding sites, which fragments comprise a heavy-chain variable domain (V_{H}) connected to a light-chain variable domain (V_{L}) in the same polypeptide chain (V_{H}-V_{L}). By using a linker that is too short to allow pairing between the two domains on the same chain, the domains are forced to pair with the complementary domains of another chain and create two antigen-binding sites. Diabodies are described more fully in, for example, EP 404,097; WO 93/11161; and Hollinger et al. (1993) Proc. Natl. Acad. Sci. USA 90:6444-6448.

[0095] As used herein, the term “affinity” refers to the equilibrium constant for the reversible binding of two agents (e.g., an antibody and an antigen) and is expressed as a dissociation constant (K_{D}). Affinity can be at least 1-fold greater, at least 2-fold greater, at least 3-fold greater, at least 4-fold greater, at least 5-fold greater, at least 6-fold greater, at least 7-fold greater, at least 8-fold greater, at least 9-fold greater, at least 10-fold greater, at least 20-fold greater, at least 30-fold greater, at least 40-fold greater, at least 50-fold greater, at least 60-fold greater, at least 70-fold greater, at least 80-fold greater, at least 90-fold greater, at least 100-fold greater, or at least 1,000-fold greater, or more, than the affinity of an antibody for unrelated amino acid sequences. Affinity of an antibody to a target protein can be, for example, from about 100 nanomolar (nM) to about 0.1 nM, from about 100 nM to about 1 picomolar (pM), or from about 100 nM to about 1 femtomolar (fM) or more. As used herein, the term “avidity” refers to the resistance of a complex of two or more agents to dissociation after dilution. The terms “immunoreactive” and “preferentially binds” are used interchangeably herein with respect to antibodies and/or antigen-binding fragments.

[0096] The term “binding” refers to a direct association between two molecules, due to, for example, covalent, electrostatic, hydrophobic, and ionic and/or hydrogen-bond interactions, including interactions such as salt bridges and water bridges. “Specific binding” refers to binding with an affinity of at least about 10⁻⁷ μM or greater, e.g., 5×10⁻⁷ M, 10⁻⁸ M, 5×10⁻⁸ M, and greater. “Non-specific binding” refers to binding with an affinity of less than about 10⁻⁷ M, e.g., binding with an affinity of 10⁻⁶ M, 10⁻¹ M, 10⁻⁴ M, etc.

[0097] An “isolated” polypeptide is one that has been identified and separated and/or recovered from a component of its natural environment. Contaminant components of its natural environment are materials that would interfere with diagnostic or therapeutic uses for the polypeptide, and may include enzymes, hormones, and other proteinaceous or nonproteinaceous solutes. In some embodiments, the polypeptide will be purified (1) to greater than 90%, greater than 95%, or greater than 98%, by weight of protein as determined by the Lowry method, for example, more than 99% by weight, (2) to a degree sufficient to obtain at least 15 residues of N-terminal or internal amino acid sequence by use of a spinning cup sequenator, or (3) to homogeneity by sodium dodecyl sulfate-polyacrylamide gel electrophoresis (SDS-PAGE) under reducing or nonreducing conditions using Coomassie blue or silver stain. Isolated polypeptide includes the polypeptide in situ within recombinant cells since at least one component of the polypeptide's natural environment will not be present. In some instances, isolated polypeptide will be prepared by at least one purification step.

[0098] As will be apparent to those of skill in the art upon reading this disclosure, each of the individual embodiments described and illustrated herein has discrete components and features which may be readily separated from or combined with the features of any of the other several embodiments without departing from the scope or spirit of the present invention. Any recited method can be carried out in the order of events recited or in any other order which is logically possible.

[0099] Where a range of values is provided, it is understood that each intervening value, to the tenth of the unit of the lower limit unless the context clearly dictates otherwise, between the upper and lower limit of that range and any other stated or intervening value in that stated range, is encompassed within the invention. The upper and lower limits of these smaller ranges may independently be included in the smaller ranges, and are also encompassed within the invention, subject to any specifically excluded limit in the stated range. Where the stated range includes one or both of the limits, ranges excluding either or both of those included limits are also included in the invention.

[0100] Unless defined otherwise, all technical and scientific terms used herein have the same meaning as commonly understood by one of ordinary skill in the art to which this invention belongs. Although any methods and materials similar or equivalent to those described herein can also be used in the practice or testing of the present invention, the preferred methods and materials are now described. All publications mentioned herein are incorporated herein by reference to disclose and describe the methods and/or materials in connection with which the publications are cited.

[0101] It must be noted that as used herein and in the appended claims, the singular forms “a,” “an,” and “the” include plural referents unless the context clearly dictates otherwise. Thus, for example, reference to “a target molecule” includes a plurality of such target molecules and reference to “the biomolecule” includes reference to one or more biomolecules and equivalents thereof known to those skilled in the art, and so forth. It is further noted that the claims may be drafted to exclude any optional element. As such, this statement is intended to serve as antecedent basis for use of such exclusive terminology as “solely,” “only” and the like in connection with the recitation of claim elements, or use of a “negative” limitation.

[0102] It is appreciated that certain features of the invention, which are, for clarity, described in the context of separate embodiments, may also be provided in combination in a single embodiment. Conversely, various features of the invention, which are, for brevity, described in the context of a single embodiment, may also be provided separately or in any suitable sub-combination. All combinations of the embodiments pertaining to the invention are specifically embraced by the present invention and are disclosed herein just as if each and every combination was individually and explicitly disclosed. In addition, all sub-combinations of the various embodiments and elements thereof are also specifically embraced by the present invention and are disclosed herein just as if each and every such sub-combination was individually and explicitly disclosed herein.

[0103] The publications discussed herein are provided solely for their disclosure prior to the filing date of the present application. Nothing herein is to be construed as an admission that the present invention is not entitled to antedate such publication by virtue of prior invention. Further, the dates of publication provided may be different from the actual publication dates which may need to be independently confirmed.

### DETAILED DESCRIPTION

[0104] The present disclosure provides a method for chemoselective modification of a target molecule. The present disclosure provides compositions comprising a subject target molecule comprising a thiol moiety, and a biomolecule comprising a phenol moiety or a catechol moiety. The present disclosure provides kits providing a first container including a subject composition, and a second container including an enzyme capable of oxidizing the phenol moiety or the catechol moiety. The present disclosure also provides modified target molecules, that may find use in the delivery of biomolecules for gene therapy, novel immunotherapies through antibody conjugates, biomaterial construction and vaccine development.

### Methods

[0105] As summarized above, aspects of the present disclosure include a method for chemoselective modification of a target molecule. The subject method includes contacting a target molecule comprising a thiol moiety with a biomolecule comprising a reactive moiety, wherein the reactive moiety is generated by reaction of a biomolecule comprising a phenol moiety or a catechol moiety with an enzyme capable of oxidizing the phenol moiety or the catechol moiety. The contacting is carried out under conditions sufficient for conjugation of the target molecule to the biomolecule, thereby producing a modified target molecule.

[0106] In some cases, a subject method for chemoselective modification of a target molecule comprises contacting: i) a target molecule comprising a thiol moiety; ii) a biomolecule comprising a phenol moiety or a catechol moiety; and iii) an enzyme capable of oxidizing the phenol or catechol moiety; wherein the enzyme oxidizes the phenol or catechol moiety of the biomolecule to generate a reactive moiety, thereby generating a biomolecule comprising the reactive moiety, and wherein the reactive moiety reacts with the thiol moiety, thereby conjugating the target molecule and the biomolecule to one another, thereby producing a modified target molecule. In some cases, the target molecule comprises a single thiol moiety. In some cases, the target molecule comprises two thiol moieties.

[0107] The target molecule can be any of a variety of molecules (e.g., polypeptides; nucleic acids; small molecules; etc.). Similarly, the biomolecule can be any of a variety of molecules (e.g., polypeptides; nucleic acids; small molecules; etc.). In some cases, the target molecule is a polypeptide; and the biomolecule is a nucleic acid. In some cases, the target molecule is a nucleic acid; and the biomolecule is a polypeptide. In some cases, the target molecule is a polypeptide; and the biomolecule is a small molecule (e.g., a cancer chemotherapeutic agent). In some cases, the target molecule is a first polypeptide; and the biomolecule is a second polypeptide, where the first polypeptide and the second polypeptide can be the same or different.

[0108] The subject methods provide a simple coupling procedure that can attach biomolecules of interest in a site-specific manner to any position on the surface of a target molecule, thereby producing a modified target molecule of interest. In some embodiments, the target molecule is a second biomolecule (e.g., as described herein). In some embodiments, the second biomolecule is a polypeptide.

[0109] Biomolecules of interest include, but are not limited to, polypeptides, polynucleotides, carbohydrates, lipids, fatty acids, steroids, purines, pyrimidines, derivatives, structural analogs thereof and combinations thereof. In certain instances, the biomolecule of interest is an antibody. In some instances, the biomolecule of interest is an antibody fragment or binding derivative thereof. In some cases, the antibody fragment or binding derivative thereof is selected from the group consisting of a Fab fragment, a F(ab′)₂ fragment, a single-chain Fv (scFv), a diabody, a nanobody, and a triabody. Suitable biomolecules include, e.g., small molecules (e.g., cancer chemotherapeutic agents, etc.), cytokines, hormones, immunomodulatory polypeptides, and the like. In some cases, the biomolecule is a nucleic acid; and the target molecule is an antibody (e.g., a scFv; a nanobody; and the like). In some cases, the biomolecule is a small molecule (e.g., a cancer chemotherapeutic agent); and the target molecule is an antibody (e.g., a scFv; a nanobody; and the like). In some cases, e.g., where the target molecule is an antibody, the biomolecule is attached to the Fc portion of the target molecule. In some cases, the target molecule is an immunoglobulin (Ig) Fc polypeptide.

[0110] In certain embodiments, the biomolecule comprising a phenol or catechol moiety further comprises, one or more moieties selected from a fluorophore, an active small molecule, an affinity tag, and a metal-chelating agent (e.g., as described herein). In certain instances, the biomolecule of interest is a fluorescent protein. In certain cases, the fluorescent protein is a green fluorescent protein (GFP). In certain cases, the biomolecule is an enzyme. In certain cases, the biomolecule is a ligand for a receptor. In certain cases, the biomolecule is a receptor.

[0111] In some embodiments, the enzyme capable of oxidizing the phenol moiety or the catechol moiety is a phenol oxidase or a catechol oxidase. In certain cases, the enzyme is a tyrosinase.

[0112] The term “tyrosinase” is used herein to refer to monophenol monooxygenase (EC 1.14.18.1; CAS number: 9002-10-2), an enzyme that catalyses the oxidation of phenols (such as tyrosine). It is a copper-containing enzyme present in plant and animal tissues that catalyzes the production of melanin and other pigments from tyrosine by oxidation. All tyrosinases have in common a binuclear type 3 copper center within their active site. Here two copper atoms are each coordinated with three histidine residues. Matoba et al., “Crystallographic evidence that the dinuclear copper center of tyrosinase is flexible during catalysis,” J Biol Chem. 2006 Mar. 31; 281(13):8981-90. Epub 2006 Jan. 25, disclose a three dimensional model of a tyrosinase catalytic center.

[0113] In certain embodiments, the subject enzyme is affixed to a solid support system, such as beads, resins, gels, microspheres, or other geometric configurations. In certain cases, the solid support is a glass bead. In some cases, the solid support is a resin bead. Use of an enzyme affixed to a solid support system can allow for multiple use of the subject enzyme, and can facilitate purification of the subject target molecules by allowing for the enzyme to be easily removed from the reaction mixture. In certain embodiments, the subject enzyme affixed to a solid support system can allow for the subject methods to be carried out in a continuous flow system. In certain embodiments, the subject enzyme affixed to a solid support system can facilitate large batch processing of the subject methods.

[0114] In certain cases, the subject phenol moiety is present in a tyrosine residue. In certain cases, the tyrosine residue is part of the biomolecule of interest. In certain cases, the tyrosine residue is synthetically introduced into the biomolecule of interest. In some other cases, the tyrosine residue is linked to the biomolecule of interest via a linker (e.g., as described herein). A tyrosine residue can be introduced using standard recombinant techniques, e.g., by modifying a nucleotide sequence encoding a polypeptide biomolecule such that a tyrosine residue is introduced into the polypeptide biomolecule.

[0115] In some cases, a phenol or catechol moiety is part of an unnatural (non-genetically encoded) amino acid that is introduced into a biomolecule of interest. For example, amber codon (TAG) suppression can be used to incorporate a non-genetically encoded amino acid residue that comprises a phenol moiety or a catechol moiety. See, e.g., Chin et al. (2002) J. Am. Chem. Soc. 124:9026; Chin and Schultz (2002) Chem. Biol. Chem. 3:1135; Chin et al. (2002) Proc. Natl. Acad. Sci. USA 99:11020; U.S. 2015/0240249; and US 2018/0171321. As another example, an orthogonal RNA synthetase and/or an orthogonal tRNA can be used for introducing a non-genetically encoded amino acid into a biomolecule, where the non-genetically encoded amino acid comprises a phenol moiety or a catechol moiety.

[0116] In some embodiments of the subject methods, the thiol moiety present in the target molecule is part of a cysteine residue. In certain cases, the cysteine residue is a native cysteine residue. In certain cases, the cysteine residue is a residue synthetically introduced into the target molecule.

[0117] In certain embodiments, the reactive moiety is an orthoquinone or a semi-quinone radical, or a combination thereof. In certain embodiments, the subject methods provide a reaction between an orthoquinone reactive intermediate and a thiol moiety, as depicted in Scheme 1 below:

[chemical structure]

where Y¹ is any convenient biomolecule optionally comprising one or more moieties selected from, an active small molecule, a cleavable probe, a fluorophore, and a metal chelator; L is an optional linker (e.g., as described herein); X¹ is selected from hydrogen and hydroxyl; Y² is any convenient biomolecule; and n is an integer from 1 to 3.

[0118] As depicted in Scheme 1, in certain embodiments, a biomolecule comprising a phenol or catechol moiety (e.g., of formula (I)), undergoes activation with an enzyme capable of oxidizing the phenol or catechol moiety. In some cases, activation is achieved with a tyrosinase enzyme in the presence of oxygen to generate an intermediate comprising a reactive moiety (e.g., orthoquinone of formula (II) and/or semi-quinone radical of formula (IIA)), and the said reactive moiety reacts with a target molecule comprising a thiol based nucleophile (e.g., of formula (III)), to result in conjugation of the target molecule to the biomolecule, thereby producing a modified target molecule (e.g., of formula (genIV)). In certain embodiments, a target molecule of formula (III) may comprise any convenient biomolecule, e.g., as described herein. In certain cases, Y2 in formula (III) is a polypeptide. In certain cases, the modified molecule is described by the formula (IV). In some cases, the modified target molecule is described by the formula (IVA). In certain cases, the modified target molecule is described by any one of formulae (IV)—(IVL), as described herein.

[0119] In certain embodiments, the subject methods provide a reaction between an orthoquinone reactive intermediate and a thiol moiety, as depicted in Scheme 2 below:

[chemical structure]

[0120] As depicted in Scheme 2, in certain embodiments, a biomolecule comprising a phenol moiety (e.g., of formula (IB)) undergoes activation with a tyrosinase enzyme in the presence of oxygen to generate an intermediate comprising a reactive moiety (e.g., orthoquinone of formula (II)), and the said reactive moiety reacts with a target molecule comprising a thiol based nucleophile (e.g., of formula (III)), to result in conjugation of the target molecule to the biomolecule, thereby producing a modified target molecule (e.g., of formula (IVM). In certain embodiments, a target molecule of formula (III) may comprise any convenient biomolecule, e.g., as described herein. In certain cases, Y² in formula (III) is a polypeptide. In certain cases of the modified molecule of formula (IVM), the thiol group is at the 3-position of the catechol ring. In certain cases of the modified molecule of formula (IVM), the thiol group is at the 5-position of the catechol ring. In certain cases of the modified molecule of formula (IVM), the thiol group is at the 6-position of the catechol ring.

[0121] In certain embodiments, the biomolecule of formula (I) may be any one of formulae (IA)-(IDb), e.g., as described herein and discussed in more detail below. In certain embodiments, the modified target molecule may be of any one of formulae (IV)—(IVL), e.g., as described herein and discussed in more detail below. In certain embodiments, the modified target molecule is a product of a single conjugation, e.g., as shown in formulae (IV1)—(IV3), (IVA1)-(IVA3), (IVB1)—(IVB3), (IVC1)—(IVC3), (IVD1)-(IVD3), (IVE1)-(IVE3), (IVF1)—(IVF3), (IVG1)-(IVG3), (IVH1)—(IVH3) and (IVJ1)-(IVJ3). In certain cases, the modified target molecule is a product of double conjugation, e.g., as shown in formulae (IV4)—(IV5), (IVA4)-(IVA5), (IVB4)—(IVB5), (IVC4)—(IVC5), (IVD4)-(IVD5), (IVE4)-(IVE5), (IVF4)—(IVF5), (IVG4)-(IVG5), (IVH4)—(IVH5) and (IVJ4)-(IVJ5).

[0122] In certain embodiments, the subject method is carried out at a pH from 4 to 9, such as 4.2, 4.5, 4.8, 5.0, 5.2, 5.5, 5.8, 6.0, 6.2, 6.5, 6.8, 7.0, 7.2, 7.5, 7.8, 8.0, 8.2, 8.5, 8.8 or 9. In certain embodiments, the subject method is carried out at a pH of from 5 to 8, such as 5.2, 5.5, 5.8, 6.0, 6.2, 6.5, 6.8, 7.0, 7.2, 7.5, 7.8 or 8.0. In certain cases, the subject method is carried out at a pH of 6 to 7.5, such as 6.0, 6.3, 6.4, 6.5, 6.6, 6.8, 7.0, 7.2, 7.4, or 7.5. In certain embodiments, the subject method is carried out at neutral pH. As used herein, the expression “neutral pH” means a pH of about 7.0 to about 7.4. The expression “neutral pH” includes pH values of about 7.0, 7.05, 7.1, 7.15, 7.2, 7.25, 7.3, 7.35, and 7.4.

[0123] In certain embodiments, the subject methods may be carried out under physiological conditions. In some embodiments, the method is carried out on living cells in vitro. In other embodiments, the method is carried out on living cells ex vivo.

[0124] In certain embodiments, the subject methods may be carried out in aqueous media in the presence of one or more buffers. Buffers of interest include, but are not limited to, a phosphate buffer, 2-amino-2-(hydroxymethyl)propane-1,3-diol (TRIS), 4-[4-(2-hydroxyethyl)piperzin-1-yl]ethanesulfonic acid (HEPES), and the like. In certain embodiments, the subject methods may be carried out in an organic solvent. In certain cases, the organic solvent is a water miscible solvent. In certain cases, the organic solvent is a dipolar aprotic solvent. In certain cases, the organic solvent is selected from acetonitrile, dimethyl formamide, methanol and acetone. In certain cases, the organic solvent is present in an amount from 1 to 20%, relative to water, such as 2%, 5%, 10%, 15% or 20%. In some cases, the subject method is carried out in from 1% to 20% acetonitrile, such as 5%, 10%, 15% or 20%. In some cases, the subject method is carried out in from 1% to 20% dimethyl formamide, such as 5%, 10%, 15%, or 20%. In some cases, the subject method is carried out in from 1% to 20% methanol, such as 5%, 10%, 15%, or 20%. In some cases, the subject method is carried out in from 1% to 20% acetone, such as 5%, 10%, 15%, or 20%.

[0125] In certain embodiments of the subject methods, the modified target molecule is a product of double or triple conjugation (e.g., referring to formula (IV), when n is 2 or 3, referred to collectively herein as “multiple conjugation products”). In certain embodiments of the subject methods, multiple conjugation products are present in less than 1 part in 10 by weight of one or more multiple conjugation products relative to the single conjugation product (e.g., referring to formula (IV), when n is 1), such as less than 1 part in 20, less than 1 part in 25, less than 1 part in 50, less than 1 part in 75, less than 1 part in 100, or even less. In certain embodiments of the subject methods, no multiple conjugation products are observed.

[0126] In certain embodiments of the methods, the modified target molecule is stable at a range of pH and temperature values and in the presence of a number of additional molecules. In some cases, the modified target molecule is stable from 0° C. to 50° C., such as 4° C. to 40° C., such as 4° C. to 37° C. In certain cases, the modified target molecule is stable over a pH range of 4 to 9, such as at pH 4, 4.5, 5, 5.5, 6, 6.5, 7, 7.5, 8, 8.5 or 9. In certain cases, the modified target molecule is stable in the presence of biologically relevant molecules. In certain cases, the modified target molecule is stable in the presence of molecules such as, the guanidinium group of an arginine residue, the primary amine of a lysine residue, and aniline moieties. In some cases, the modified target molecule is stable in physiological conditions; for example, in some cases, the modified target molecule is stable in human serum. In some cases, the modified target molecule (also referred to herein as a “target molecule-biomolecule conjugate”) is stable in human serum at 37° C. for a period of time of at least 2 days, at least 3 days, at least 4 days, at least 5 days, at least 6 days, at least 7 days, at least 10 days, or at least 14 days. In some cases, the modified target molecule (also referred to herein as a “target molecule-biomolecule conjugate”) is stable in human serum at 37° C. for a period of time of from about 2 days to about 7 days, from about 7 days to about 10 days, or from about 10 days to about 14 days.

[0127] As noted above, in some cases, the target molecule includes a single thiol moiety. In other instances, the target molecule includes two thiol moieties. In addition to being competent in an initial oxidative coupling reaction, a nucleophile bearing a second thiol in proximity to the newly-formed catechol could add in a second time in the event of re-oxidation. The intramolecular nature of the second addition could prevent or minimize secondary addition by glutathione or other molecules bearing a free thiol in a biological milieu. An example of the use of a di-thiol nucleophile (di-thiol target molecule) is depicted schematically in FIG. 44A.

[0128] Another embodiment of this strategy could be protein coupling partners with two cysteine residues. The cysteine residues could be in close proximity to one another by virtue of their position in the amino acid sequence of the protein or they could be in close spatial proximity by virtue of their position in the three-dimensional structure of the protein. A polypeptide can include a di-thiol, where the polypeptide comprises, e.g.: a CC, a CGC, a CGGC (SEQ ID NO: 1055), or a CGGGC sequence. For example, a polypeptide can comprise an amino acid sequence of the general formula: Xₙ₁C(X)n₂CXₙ₃, where X is any natural (coded) or unnatural (non-coded) amino acid, n1 and n3 are each independently zero or an integer from 1 to 5000 (or more than 5000), and n2 is zero or an integer from 1 to about 10. An example of the use of such a di-thiol target molecule is depicted schematically in FIG. 44B.

### Tyrosinase Polypeptides

[0129] Tyrosinase polypeptides that are suitable for use in generating a reactive moiety (e.g., an orthoquinone) include a tyrosinase polypeptide having at least 75%, at least 80%, at least 85%, at least 90%, at least 95%, at least 98%, at least 99%, or 100%, amino acid sequence identity to any one of the tyrosinase amino acid sequences set forth in FIG. 8, FIG. 9, FIG. 10A-10Z, and FIG. 10AA-10VV. In some cases, the tyrosinase polypeptide is an Agricus bisporus tyrosinase polypeptide. In some cases, the tyrosinase polypeptide is a Bacillus megaterium tyrosinase polypeptide. In some cases, the tyrosinase polypeptide is a Streptomyces castaneoglobisporus tyrosinase polypeptide. In some cases, the tyrosinase polypeptide is a Citrobacter freundii tyrosinase polypeptide. In some cases, the tyrosinase polypeptide is a Homo sapiens tyrosinase polypeptide. In some cases, the tyrosinase polypeptide is a Malus domestica tyrosinase polypeptide. In some cases, the tyrosinase polypeptide is an Aspergillus oryzae tyrosinase polypeptide. In some cases, the tyrosinase polypeptide is a Solanum lycopersicum tyrosinase polypeptide. In some cases, the tyrosinase polypeptide is a Burkholderia thailandensis tyrosinase polypeptide. In some cases, the tyrosinase polypeptide is a Juglans regia tyrosinase polypeptide. See, e.g., Pretzler et al. Sci. Rep. 2017, 7 (1), 1810; Ren et al. BMC Biotechnol. 2013, 13, 18; Faccio et al. Process Biochem. 2012, 47 (12), 1749-1760; Fairhead et al. FEBS J. 2010, 277 (9), 2083-2095; Do et al. Sci. Rep. 2017, 7 (1), 17267; Elsayed and Danial J. Appl. Pharm. Sci. 2018, 8 (09), 93-101; Lopez-Tejedor and Palomo Protein Expr. Purif. 2018, 145, 64-70; and Fairhead et al. Nature Biotechnol. 2012, 29 (2), 183-191.

[0130] In some cases, the tyrosinase polypeptide selectively acts on (e.g., generates a reactive moiety such as an orthoquinone) a substrate (a biomolecule) comprising a phenol moiety (e.g., a tyrosine) or a catechol moiety, where the substrate is neutral or positively charged within 50 Å (e.g., within 50 Å, within 40 Å, within 30 Å, or within 20 Å) of the phenol or the catechol moiety. For example, a tyrosinase having at least 75%, at least 80%, at least 85%, at least 90%, at least 95%, at least 98%, at least 99%, or 100%, amino acid sequence identity to any one of the tyrosinase amino acid sequences set forth in FIG. 8 or FIG. 9 can selectively modify a phenol or catechol moiety on a substrate, where the substrate is neutral or positively charged within 50 Å (e.g., within 50 Å, within 40 Å, within 30 Å, or within 20 Å) of the phenol or the catechol moiety. For example, where the biomolecule is a polypeptide, in some cases, the biomolecule comprises at least 2 neutral or positively charged amino acids within 10 amino acids of the phenol moiety (e.g., a tyrosine) or a catechol moiety. For example, where the biomolecule is a polypeptide, in some cases, the biomolecule comprises 2, 3, 4, 5, 6, 7, 8, 9, or 10 neutral or positively charged amino acids within 10 amino acids of the phenol moiety (e.g., a tyrosine) or a catechol moiety. For example, where the biomolecule is a polypeptide, in some cases, the biomolecule comprises the amino acid sequence RRRY (SEQ ID NO: 949), YRRR (SEQ ID NO: 950), RRRRY (SEQ ID NO: 951), or YRRRR (SEQ ID NO: 952).

[0131] In some cases, the tyrosinase polypeptide selectively acts on (e.g., generates a reactive moiety such as an orthoquinone) a substrate (a biomolecule) comprising a phenol moiety (e.g., a tyrosine) or a catechol moiety, where the substrate is negatively charged within 50 Å (e.g., within 50 Å, within 40 Å, within 30 Å, or within 20 Å) of the phenol or the catechol moiety. For example, a tyrosinase having at least 75%, at least 80%, at least 85%, at least 90%, at least 95%, at least 98%, at least 99%, or 100%, amino acid sequence identity to any one of the tyrosinase amino acid sequences set forth in FIG. 10A-10Z and FIG. 10AA-10VV can selectively modify a phenol or catechol moiety on a substrate, where the substrate is negatively charged within 50 Å (e.g., within 50 Å, within 40 Å, within 30 Å, or within 20 Å) of the phenol or the catechol moiety. For example, where the biomolecule is a polypeptide, in some cases, the biomolecule comprises at least 2 negatively charged amino acids within 10 amino acids of the phenol moiety (e.g., a tyrosine) or a catechol moiety. For example, where the biomolecule is a polypeptide, in some cases, the biomolecule comprises 2, 3, 4, 5, 6, 7, 8, 9, or 10 negatively charged amino acids within 10 amino acids of the phenol moiety (e.g., a tyrosine) or a catechol moiety. For example, where the biomolecule is a polypeptide, in some cases, the biomolecule comprises the amino acid sequence EEEY (SEQ ID NO: 953), YEEE (SEQ ID NO: 954), EEEEY (SEQ ID NO: 955), or YEEEE (SEQ ID NO: 956).

[0132] In some cases, the tyrosinase polypeptide comprises an amino acid sequence having at least 75%, at least 80%, at least 85%, at least 90%, at least 95%, at least 98%, at least 99%, or 100%, amino acid sequence identity to the tyrosinase amino acid sequence depicted in FIG. 10M, where the tyrosinase polypeptide comprises an amino acid substitution of D55, e.g., where D55 is substituted with a Lys. Such a tyrosinase polypeptide is particularly useful where the biomolecule has a net negative charge and/or the region surrounding the phenol or catechol moiety has a net negative charge (e.g., where the phenol group is a Tyr, the Tyr can be present in an EEEEY (SEQ ID NO: 955) or EEEY (SEQ ID NO: 953) peptide). Such a tyrosinase polypeptide is particularly useful where the biomolecule is a nucleic acid.

[0133] In some cases, the tyrosinase polypeptide comprises an amino acid sequence having at least 75%, at least 80%, at least 85%, at least 90%, at least 95%, at least 98%, at least 99%, or 100%, amino acid sequence identity to the tyrosinase amino acid sequence depicted in FIG. 10C, where the tyrosinase polypeptide comprises an amino acid substitution of R209, e.g., where R209 is substituted with a His. Such a tyrosinase polypeptide is particularly useful where the biomolecule has a net positive charge and/or the region surrounding the phenol or catechol moiety has a net positive charge (e.g., where the phenol group is a Tyr, the Tyr can be present in an RRRY (SEQ ID NO: 949) or RRRRY (SEQ ID NO: 951) peptide).

### Cell Surface Modification

[0134] In some embodiments, a subject method is used to modify the surface of a cell. Thus, in one aspect, the invention features a method of modifying the surface of cell in vitro. The method generally involves reacting a thiol group in a target molecule with a biomolecule comprising a reactive moiety to provide for chemoselective conjugation at the cell surface. In some embodiments, the method comprises modifying a target molecule on a cell surface with a thiol moiety; and reacting the thiol moiety in the target molecule with a biomolecule comprising a reactive moiety (e.g., an orthoquinone moiety). In other embodiments, the method comprises activation of a biomolecule comprising a phenol moiety on a cell surface to generate a biomolecule comprising a reactive moiety; and reacting the reactive moiety in the biomolecule with a target molecule comprising a thiol moiety.

Modification of a Target Molecule with Detectable Labels, Drugs, and Other Molecules

[0135] In some embodiments, the present disclosure provides for attachment of a biomolecule of interest to a target molecule comprising a thiol moiety. The methods generally involve reacting thiol containing target molecules with a subject biomolecule comprising a reactive moiety (e.g., an orthoquinone moiety). Target molecules and biomolecules of interest include, but are not limited to, polypeptides, polynucleotides, carbohydrates, fatty acids, steroids, purines, pyrimidines, derivatives; and the like.

### Attachment of Biomolecule of Interest to a Support

[0136] The biomolecule comprising the reactive moiety can also comprise one or more hydrocarbon linkers (e.g., an alkyl group or derivative thereof such as an alkyl ester or PEG) conjugated to a moiety providing for attachment to a solid substratum (e.g., to facilitate assays), or to a moiety providing for easy separation (e.g., a hapten recognized by an antibody bound to a magnetic bead). In one embodiment, the methods of the invention are used to provide for attachment of a protein (or other molecule that contains or can be modified to contain a thiol) to a chip in a defined orientation. For example, the methods and compositions of the disclosure can be used to deliver a tag or other moiety (e.g., as described herein) to the thiol of a target molecule, e.g., a polypeptide having a thiol moiety at a selected site (e.g., at or near the N-terminus). The tag or other moiety can then be used as the attachment site for affixing the molecule to a support (e.g., solid or semi-solid support, e.g., a support suitable for use as a microchip in high-throughput assays).

### Attachment of Biomolecules for Delivery to a Target Site

[0137] The biomolecule comprising a reactive moiety will in some embodiments comprise a small molecule drug, toxin, or other molecule for delivery to a cell. The small molecule drug, toxin, or other molecule will in some embodiments provide for a pharmacological activity. The small molecule drug, toxin, or other molecule will in some embodiments serve as a target for delivery of other molecules.

[0138] Small molecule drugs may be small organic or inorganic compounds having a molecular weight of more than 50 and less than about 2,500 daltons. Small molecule drugs may comprise functional groups necessary for structural interaction with proteins, particularly hydrogen bonding, and may include at least an amine, carbonyl, hydroxyl or carboxyl group, and may contain at least two of the functional chemical groups. The drugs may comprise cyclical carbon or heterocyclic structures and/or aromatic or polyaromatic structures substituted with one or more of the above functional groups. Small molecule drugs are also found among biomolecules including peptides, saccharides, fatty acids, steroids, purines, pyrimidines, derivatives, structural analogs or combinations thereof.

[0139] In another embodiment, a subject biomolecule comprising a reactive moiety comprises one of a pair of binding partners (e.g., a ligand; a ligand-binding portion of a receptor; an antibody; an antigen-binding fragment of an antibody; an antigen; a hapten; a lectin; a lectin-binding carbohydrate; etc.). For example, the biomolecule can comprise a polypeptide that serves as a viral receptor and, upon binding with a viral envelope protein or viral capsid protein, facilitates attachment of virus to the cell surface on which the biomolecule is displayed. Alternatively, the biomolecule comprises an antigen that is specifically bound by an antibody (e.g., monoclonal antibody), to facilitate detection and/or separation of host cells displaying the antigen on the cell surface. In another example, the biomolecule comprises a ligand binding portion of a receptor, or a receptor-binding portion of a ligand.

### Compounds

### Biomolecule Comprising a Phenol Moiety or a Catechol Moiety

[0140] In certain embodiments of the subject methods, the biomolecule comprising a phenol moiety or a catechol moiety is described by the formula (I).

[chemical structure]

[0141] where Y¹ is a biomolecule, optionally comprising one or more moieties selected from, an active small molecule, an affinity tag, a fluorophore, and a metal-chelating agent; X¹ is selected from hydrogen and hydroxyl; and L is an optional linker.

[0142] In certain embodiments of formula (I), X¹ is hydrogen, such that the biomolecule comprises a phenol moiety. In other embodiments of formula (I), X¹ is hydroxyl, such that the biomolecule comprises a catechol moiety.

[0143] In some embodiments of formula (I), the phenol moiety is present in a tyrosine residue. In certain cases, the biomolecule comprising a phenol moiety of formula (I), is of the formula (IB) or (IC):

[chemical structure]

[0144] Wherein R² is selected from alkyl, and substituted alkyl; and R³ is selected from hydrogen, alkyl, substituted alkyl, a peptide, and a polypeptide.

[0145] In certain embodiments of the subject methods, the biomolecule comprising a phenol moiety or a catechol (e.g., of formula (I)) includes a linker (e.g., as described herein). Suitable linkers include, but are not limited to, a carboxylic acid, an alkyl ester, an aryl ester, a substituted aryl ester, an aldehyde, an amide, an aryl amide, an alkyl halide, a thioester, a sulfonyl ester, an alkyl ketone, an aryl ketone, a substituted aryl ketone, a halosulfonyl, a nitrile, a nitro, a PEG, and a peptide linker.

[0146] Exemplary linkers for use in linking the phenol moiety to the subject biomolecule of interest will in some embodiments include a PEG linker. As used herein the term “PEG” refers to a polyethylene glycol or a modified polyethylene glycol. Modified polyethylene glycol polymers include a methoxypolyethylene glycol, and polymers that are unsubstituted or substituted at one end with an alkyl, a substituted alkyl or a functional group (e.g., as described herein). Any convenient linking groups may be utilized at the terminal of a PEG to connect the group to a moiety of interest including but not limited to, alkyl, aryl, hydroxyl, amino, acyl, acyloxy, carboxyl ester and amido terminal and/or substituent groups. In certain instances, the linker includes more than 1 PEG unit, such as 2, 3, 4, 5, 6, 7, 8, 9 or 10 PEG units. In certain instances, the linker includes less than 10 PEG units, such as 9, 8, 7, 6, 5, 4, 3, 2 or 1 PEG unit. In certain cases, linker is composed of 4 or fewer PEG units.

[0147] In certain cases, the biomolecule comprising a phenol moiety is described by the formula (IA):

[chemical structure]

[0148] wherein:
[0149] Y¹ is a biomolecule optionally comprising one or more groups selected from, an active small molecule, an affinity tag, a fluorophore, and a metal-chelating agent;
[0150] each R¹ is independently selected from hydrogen, acyl, substituted acyl, alkyl, and substituted alkyl;
[0151] X¹ is selected from hydrogen and hydroxyl; and
[0152] L¹ is a linker selected from a straight or branched alkyl, a straight or branched substituted alkyl, a polyethylene glycol (PEG), a substituted PEG, and one or more peptides.

[0153] In certain embodiments, X¹ is hydrogen, such that the compound of formula (IA) is of the formula (IAa):

[chemical structure]

[0154] In certain embodiments of any of formulae (IA)-(IAa), at least one R¹ is hydrogen. In certain cases, both R¹ groups are hydrogen. In certain cases, one R¹ group is hydrogen, and the other R¹ group is selected from alkyl, substituted alkyl, acyl and substituted acyl. In certain cases, one R¹ group is hydrogen and the other R¹ group is alkyl. In some cases, one R¹ group is hydrogen and the other R¹ group is substituted alkyl. In some cases, one R¹ group is hydrogen and the other R¹ group is acyl. In some cases, one R¹ group is hydrogen, and the other R¹ group is substituted acyl. In some cases the acyl group is of the formula —C(O)R⁴, wherein R⁴ is a lower alkyl group, e.g., methyl, ethyl, propyl, butyl, pentyl, or hexyl. In some cases, the substituted acyl group is of the formula —C(O)R⁴NH₂, wherein R⁴ is a lower alkyl group, e.g., methyl, ethyl, propyl, butyl, pentyl or hexyl. In some cases, the substituted acyl group is of the formula —C(O)CH₂NH₂.

[0155] In certain embodiments of any of formulae (IA)-(IAa), L¹ is a straight or branched alkyl. In certain cases, L¹ is a lower alkyl group, e.g., methyl, ethyl, propyl, butyl, pentyl, or hexyl. In certain cases, L¹ is a substituted alkyl group. In certain cases, L¹ is a substituted lower alkyl group. In certain cases, L¹ is a PEG or substituted PEG (e.g., as described herein). In certain other cases, L¹ is a peptide. In certain other cases, L¹ is a polypeptide. In certain cases, L¹ is a linear linker of 1-12 atoms in length, such as 1-10, 1-8 or 1-6 atoms in length, e.g., 1, 2, 3, 4, 5 or 6 atoms in length. The linker L¹ can be a (C₁₋₆)alkyl linker or a substituted (C₁₋₆)alkyl linker, optionally substituted with a heteroatom or linking functional group, such as an ester (—CO₂—), amido (CONH), carbamate (OCONH), ether (—O—), thioether (—S—) and/or amino group (—NR— where R is H or alkyl). In certain cases, the linker L¹ can include a keto (C═O) group. In certain cases, the keto group together with an amino, thiol or ether group in the linker chain can provide an amido, an ester or thioester group linkage.

[0156] In certain embodiments, the linking group L or L¹ is a cleavable linker, e.g., as described herein.

[0157] In certain embodiments, the biomolecule comprising a phenol or catechol moiety is described by the formula (ID):

[chemical structure]

where Y¹ is a biomolecule optionally comprising one or more groups selected from, an active small molecule, an affinity tag, a fluorophore, and a metal-chelating agent; X¹ is selected from hydrogen and hydroxyl; and n is an integer from 0 to 20. In certain cases, n is 10 or less, such as 9, 8, 7, 6, 5, 4, 3, 2, 1 or 0. In certain cases, n is 5. In certain cases, n is 4. In certain cases, n is 3. In certain cases, n is 2. In certain cases, n is 1. In certain cases, n is 0.

[0158] In certain embodiments, n is 1, such that the compound of formula (ID) is of the formula (IDa):

[chemical structure]

[0159] In certain cases of formula (ID) or (IDa), X¹ is hydrogen, such that the biomolecule comprises a phenol moiety. In other embodiments of formula (ID) or (IDa), X¹ is hydroxyl, such that the biomolecule comprises a catechol moiety.

[0160] In certain cases, the compound of formula (IDa) is of the formula (IDb):

[chemical structure]

[0161] Compounds of any of formula (ID)-(IDb) may be prepared by reacting tyramine, or a corresponding phenol or catechol containing amine, to a biomolecule including a N-hydroxysuccinimide (NHS) ester or maleimide group in a suitable solvent. For example, a compound of formula (IDb) may be prepared by reaction of NHS-ester (Y¹—NHS) with tyramine in dry dimethylformamide (DMF) to provide compound (IDb), as depicted in Scheme 3 below:

[chemical structure]

[0162] It will be understood that the biomolecule comprising a phenol moiety or a catechol moiety (e.g., of any of formulae (I)—(IDb)) may be prepared by any convenient methods. Many general references providing commonly known chemical synthetic schemes and conditions useful for synthesizing the subject phenol and catechol containing moieties are available (see, e.g., Smith and March, March's Advanced Organic Chemistry: Reactions, Mechanisms, and Structure, Fifth Edition, Wiley-Interscience, 2001; or Vogel, A Textbook of Practical Organic Chemistry, Including Qualitative Organic Analysis, Fourth Edition, New York: Longman, 1978). As disclosed herein, in certain cases the subject phenol moiety is present in a tyrosine residue. The tyrosine residue may be part of the biomolecule of interest. In other cases, the tyrosine moiety may be synthetically introduced into the biomolecule of interest. For example, where the biomolecule is a peptide or a polypeptide, the tyrosine residue may be introduced by standard solid-phase Fmoc peptide chemistry (Fields G B, Noble R L. Solid phase peptide synthesis utilizing 9-fluorenylmethoxycarbonyl amino acids. Int J Pept Protein Res 35: 161-214, 1990). In some cases, a phenol or catechol moiety is part of an unnatural (non-genetically encoded) amino acid that is introduced into a biomolecule of interest. For example, amber codon (TAG) suppression can be used to incorporate a non-genetically encoded amino acid residue that comprises a phenol moiety or a catechol moiety. See, e.g., Chin et al. (2002) J. Am. Chem. Soc. 124:9026; Chin and Schultz (2002) Chem. Biol. Chem. 3:1135; Chin et al. (2002) Proc. Natl. Acad. Sci. USA 99:11020; U.S. 2015/0240249; and US 2018/0171321. As another example, an orthogonal RNA synthetase and/or an orthogonal tRNA can be used for introducing a non-genetically encoded amino acid into a biomolecule, where the non-genetically encoded amino acid comprises a phenol moiety or a catechol moiety.

[0163] In some embodiments of any one of formulae (I)—(IDb), the biomolecule of interest comprises one or more groups selected from an active small molecule, an affinity tag, a fluorophore, and a metal-chelating agent. In certain cases, the fluorophore is a rhodamine dye. In certain cases, the fluorophore is a xanthene dye. In certain cases, the fluorophore is Oregon Green 488. In certain cases, the metal-chelating agent is 1,4,7,10-Tetraazacyclododecane-1,4,7,10-tetraacetic acid (also referred to as, DOTA, or tetraxetan). In certain cases, the affinity tag is a biotin moiety (e.g., as described herein).

[0164] In certain cases, the biomolecule comprising a phenol moiety is described by a structure as depicted in FIG. 3.

### Target Molecule Comprising a Thiol Moiety

[0165] Molecules comprising a thiol moiety and suitable for use in the subject methods, as well as methods for producing thiol-comprising molecules suitable for use in the subject methods, are well known in the art.

[0166] The target molecules can be naturally occurring, or may be synthetically or recombinantly produced, and may be isolated, substantially purified, or present within the native milieu of the unmodified molecule upon which the thiol-containing target molecule is based (e.g., on a cell surface or within a cell, including within a host animal, e.g., a mammalian animal, such as a murine host (e.g., rat, mouse), hamster, canine, feline, bovine, swine, and the like). In some embodiments, the target molecule is present in vitro in a cell-free reaction. In other embodiments, the target molecule is present in a cell and/or displayed on the surface of a cell. In many embodiments of interest, the target molecule is in a living cell; on the surface of a living cell; in a living organism, e.g., in a living multicellular organism. Suitable living cells include cells that are part of a living multicellular organism; cells isolated from a multicellular organism; immortalized cell lines; and the like.

[0167] The target molecule may be composed of D-amino acids, L-amino acids, or both, and may be further modified, either naturally, synthetically, or recombinantly, to include other moieties. For example, the target molecule may be a lipoprotein, a glycoprotein, or other such modified protein.

[0168] In general, the target molecule comprises at least one thiol moiety for reaction with a biomolecule comprising a reactive moiety according to the invention, but may comprise 2 or more, 3 or more, 5 or more, 10 or more thiol moieties. The number of thiol moieties that may be present in a target molecule will vary according to the intended application of the modified target molecule of the reaction, the nature of the target molecule itself, and other considerations which will be readily apparent to the ordinarily skilled artisan in practicing the methods as disclosed herein.

[0169] The target molecule can be modified to comprise a thiol moiety at the point at which linkage to the biomolecule comprising a reactive moiety is desired. For example, when the target molecule is a peptide or a polypeptide, the target molecule substrate may be modified to contain an N-terminal thiol moiety, thereby producing a subject target peptide or polypeptide comprising a thiol moiety. It will be understood that any convenient location on a peptide or a polypeptide substrate may be modified to contain a thiol moiety and thereby produce a target peptide or polypeptide for use in the subject methods.

[0170] In certain embodiments, the target molecule comprising a thiol moiety is a CRISPR-Cas effector polypeptide.

[0171] In certain cases, the thiol moiety is present in a cysteine residue. In certain cases, the cysteine residue is native to the CRISPR-Cas effector polypeptide. In other cases, the cysteine residue is introduced into the CRISPR-Cas effector polypeptide. For example, the cysteine residue may be introduced by standard solid-phase Fmoc peptide chemistry (Fields G B, Noble R L. Solid phase peptide synthesis utilizing 9-fluorenylmethoxycarbonyl amino acids. Int J Pept Protein Res 35: 161-214, 1990).

### Modified Target Molecule

[0172] In certain embodiments of the subject methods, the modified target molecule produced is of the formula (IV) or (IVA), or a combination thereof. Accordingly, aspects of the disclosure include a compound of formula (IV) or (IVA):

[chemical structure]

[0173] where Y1 is a biomolecule, optionally comprising one or more moieties selected from, an active small molecule, an affinity tag, a fluorophore, and a metal-chelating agent; L is an optional linker; Y2 is a second biomolecule; and n is an integer from 1 to 3.

[0174] In certain embodiments of formula (IV) or (IVA), n is less than 3, such as 2 or 1. In certain cases, n is 2. In certain cases, n is 1. In certain cases, the subject modified target molecule is a compound of formula (IV). In certain cases, the subject modified target molecule is a compound of formula (IVA).

[0175] In some embodiments, the modified target molecule of formula (IV), n is 1 and the compounds is described by any of formulae (IV1)—(IV3):

[chemical structure]

[0176] In some embodiments, the modified target molecule of formula (IV), n is 2 and the compounds is described by any of formulae (IV4)—(IV5):

[chemical structure]

[0177] In some embodiments, the modified target molecule is of formula (IVA), n is 1, and the compound is described by any of formulae (IVA1)-(IVA3):

[chemical structure]

[0178] In some embodiments, the modified target molecule is of formula (IVA), n is 2, and the compound is described by any of formulae (IVA4)-(IVA5):

[chemical structure]

[0179] In certain embodiments, the modified target molecule includes a linker (e.g., as described herein). Suitable linkers include, but are not limited to, a carboxylic acid, an alkyl ester, an aryl ester, a substituted aryl ester, an aldehyde, an amide, an aryl amide, an alkyl halide, a thioester, a sulfonyl ester, an alkyl ketone, an aryl ketone, a substituted aryl ketone, a halosulfonyl, a nitrile, a nitro, and a peptide linker.

[0180] Exemplary linkers for use in linking the orthoquinone to the biomolecule (Y′) will in some embodiments include an amide, such as —(CR¹₂)ₘNHC(O)—, wherein R¹ is selected from hydrogen, or a substituent (e.g., as described herein) and m is an integer from 1 to 20. Exemplary linkers may also include a PEG or a substituted PEG linker, e.g., as described herein.

[0181] In certain embodiments, the linker is a cleavable linker, e.g., as described herein.

[0182] In certain embodiments, the modified target molecule is described by the formula (IVB) or (IVC):

[chemical structure]

[0183] where Y¹ is a biomolecule optionally comprising one or more groups selected from, an active small molecule, an affinity tag, a fluorophore, and a metal-chelating agent; each R¹ is independently selected from hydrogen, acyl, substituted acyl, alkyl, and substituted alkyl; Y² is a second biomolecule; L¹ is a linker selected from a straight or branched alkyl, a straight or branched substituted alkyl, a polyethylene glycol (PEG), a substituted PEG, and one or more peptides; and n is an integer from 1 to 3.

[0184] In certain embodiments of formula (IVB) or (IVC), n is less than 3, such as 2 or 1. In certain cases, n is 2. In certain cases, n is 1. In certain cases, the subject modified target molecule is a compound of formula (IVB). In certain cases, the subject modified target molecule is a compound of formula (IVC).

[0185] In some embodiments, the modified target molecule of formula (IVB), n is 1 and the compounds is described by any of formulae (IVB1)-(IVB3):

[chemical structure]

[0186] In some embodiments, the modified target molecule of formula (IVB), n is 2 and the compounds is described by any of formulae (IVB4)-(IVB5):

[chemical structure]

[0187] In some embodiments, the modified target molecule is of formula (IVC), n is 1, and the compound is described by any of formulae (IVC1)-(IVC3):

[chemical structure]

[0188] In some embodiments, the modified target molecule is of formula (IVC), n is 2, and the compound is described by any of formulae (IVC4)-(IVC5):

[chemical structure]

[0189] In certain embodiments of any of formulae (IVB)-(IVC5), at least one R¹ is hydrogen. In certain cases, both R¹ groups are hydrogen. In certain cases, one R¹ group is hydrogen, and the other R¹ group is selected from alkyl, substituted alkyl, acyl and substituted acyl. In certain cases, one R¹ group is hydrogen and the other R¹ group is alkyl. In some cases, one R¹ group is hydrogen and the other R¹ group is substituted alkyl. In some cases, one R¹ group is hydrogen and the other R¹ group is acyl. In some cases, one R¹ group is hydrogen, and the other R¹ group is substituted acyl. In some cases the acyl group is of the formula —C(O)R⁴, wherein R⁴ is a lower alkyl group, e.g., methyl, ethyl, propyl, butyl, pentyl, or hexyl. In some cases, the substituted acyl group is of the formula —C(O)R⁴NH₂, wherein R⁴ is a lower alkyl group, e.g., methyl, ethyl, propyl, butyl, pentyl or hexyl. In some cases, the substituted acyl group is of the formula —C(O)CH₂NH₂.

[0190] In certain embodiments of any of formulae (IVB)-(IVC5), L¹ is a straight or branched alkyl. In certain cases, L¹ is a lower alkyl group, e.g., methyl, ethyl, propyl, butyl, pentyl, or hexyl. In certain cases, L¹ is a substituted alkyl group. In certain cases, L¹ is a substituted lower alkyl group. In certain cases, L¹ is a PEG or substituted PEG (e.g., as described herein). In certain other cases, L¹ is a peptide. In certain other cases, L¹ is a polypeptide. In certain cases, L¹ is a linear linker of 1-12 atoms in length, such as 1-10, 1-8 or 1-6 atoms in length, e.g., 1, 2, 3, 4, 5 or 6 atoms in length. The linker L¹ can be a (C₁₋₆)alkyl linker or a substituted (C₁₋₆)alkyl linker, optionally substituted with a heteroatom or linking functional group, such as an ester (—CO₂—), amido (CONH), carbamate (OCONH), ether (—O—), thioether (—S—) and/or amino group (—NR— where R is H or alkyl). In certain cases, the linker L¹ can include a keto (C═O) group. In certain cases, the keto group together with an amino, thiol or ether group in the linker chain can provide an amido, an ester or thioester group linkage.

[0191] In certain embodiments, the linking group L¹ is a cleavable linker, e.g., as described herein.

[0192] In certain embodiments, the modified target molecule is described by any of the formulae (IVD)-(IVG):

[chemical structure]

where R² is selected from alkyl, and substituted alkyl; R³ is selected from, hydrogen, alkyl substituted alkyl, a peptide, and a polypeptide; and n is an integer from 1 to 3.

[0193] In certain embodiments of any of formulas (IVD)-(IVG), n is less than 3, such as 2 or 1. In certain cases, n is 2. In certain cases, n is 1. In certain cases, the subject modified target molecule is a compound of formula (IVD). In certain cases, the subject modified target molecule is a compound of formula (IVE). In certain cases, the subject modified target molecule is a compound of formula (IVF). In certain cases, the subject modified target molecule is a compound of formula (IVG).

[0194] In certain embodiments, any of formulae (IVD)-(IVG) may have relative stereochemistry as shown in the following structures:

[chemical structure]

[0195] In some embodiments, the modified target molecule of formula (IVD), n is 1 and the compounds is described by any of formulae (IVD1)-(IVD3):

[chemical structure]

### (IVD1) (IVD2) (IVD3).

[0196] In some embodiments, the modified target molecule of formula (IVD), n is 2 and the compounds is described by any of formulae (IVD4)-(IVD5):

[chemical structure]

[0197] In some embodiments, the modified target molecule of formula (IVE), n is 1 and the compounds is described by any of formulae (IVE1)-(IVE3):

[chemical structure]

[0198] In some embodiments, the modified target molecule of formula (IVE), n is 2 and the compounds is described by any of formulae (IVE4)-(IVE5):

[chemical structure]

[0199] In some embodiments, the modified target molecule of formula (IVF), n is 1 and the compounds is described by any of formulae (IVF1)—(IVF3):

[chemical structure]

### (IVF1) (IVF2) (IVF3).

[0200] In some embodiments, the modified target molecule of formula (IVF), n is 2 and the compounds is described by any of formulae (IVF4)—(IVF5):

[chemical structure]

[0201] In some embodiments, the modified target molecule of formula (IVG), n is 1 and the compounds is described by any of formulae (IVG1)-(IVG3):

[chemical structure]

[0202] In some embodiments, the modified target molecule of formula (IVG), n is 2 and the compounds is described by any of formulae (IVG4)-(IVG5):

[chemical structure]

[0203] In certain embodiments of the target molecules described herein, R² is an alkyl group. In certain cases, R² is a substituted alkyl group. In certain cases, the alkyl group is a lower alkyl group, e.g., methyl, ethyl, propyl, butyl, pentyl or hexyl.

[0204] In certain embodiments of the target molecules described herein, R³ is hydrogen. In certain cases, R3 an alkyl group. In certain cases, R³ is a substituted alkyl group. In certain cases the alkyl group is a lower alkyl group, e.g., methyl, ethyl, propyl, butyl, pentyl or hexyl. In certain cases, R³ is a peptide. In certain cases, R³ is a polypeptide.

[0205] In certain embodiments, the modified target molecule is described by the formula (IVH) or (IVJ):

[chemical structure]

where Y¹ is a biomolecule optionally comprising one or more groups selected from, an active small molecule, an affinity tag, a fluorophore, and a metal-chelating agent; Y² is a second biomolecule; n is an integer from 1 to 3; and m is an integer from 0 to 20. In certain cases, m is 10 or less, such as 9, 8, 7, 6, 5, 4, 3, 2, 1 or 0. In certain cases, m is 5. In certain cases, m is 4. In certain cases, m is 3. In certain cases, m is 2. In certain cases, m is 1. In certain cases, m is 0.

[0206] In certain embodiments of the subject methods, the modified target molecule is described by the formula (IVK) or IVL):

[chemical structure]

[0207] In certain embodiments of any of formulae (IVH)—(IVJ), n is less than 3, such as 2 or 1. In certain cases, n is 2. In certain cases, n is 1.

[0208] In some embodiments, the modified target molecule of formula (IVH), n is 1 and the compounds is described by any of formulae (IVH1)—(IVH3):

[chemical structure]

[0209] In some embodiments, the modified target molecule of formula (IVH), n is 2 and the compounds is described by any of formulae (IVH4)—(IVH5):

[chemical structure]

[0210] In some embodiments, the modified target molecule of formula (IVJ), n is 1 and the compounds is described by any of formulae (IVJ1)-(IVJ3):

[chemical structure]

[0211] In some embodiments, the modified target molecule of formula (IVJ), n is 2 and the compounds is described by any of formulae (IVJ4)-(IVJ5):

[chemical structure]

[0212] In certain embodiments, the target molecule comprising a thiol group is a CRISPR-Cas effector polypeptide (e.g., as described herein).

[0213] In certain embodiments of any one of formulae (IV) to (IVJ5), Y¹ is a polypeptide. In certain cases, the Y¹ polypeptide is selected from a fluorescent protein, an antibody, and an enzyme. In certain cases, the fluorescent protein is a green fluorescent protein. Other suitable polypeptides are described elsewhere herein.

### Cleavable Linkers

[0214] Cleavable linkers that may be employed in the subject molecules of interest include electrophilically cleavable linkers, nucleophilically cleavable linkers, photocleavable linkers, metal cleavable linkers, electrolytically-cleavable, and linkers that are cleavable under reductive and oxidative conditions. In certain cases, the cleavable linker is cleaved under acidic conditions. In certain cases, the cleavable linker is cleaved by an enzyme. In certain cases, the cleavable linker is a linker that is cleaved under reducing conditions. In certain cases, the cleavable linker is cleaved rapidly by glutathione reduction. In certain cases, the cleavable linker includes a disulfide bond. In certain cases, the cleavable linker is cleaved by a physical stimulus. In certain cases, the cleavable linker is photocleavable.

[0215] In certain cases, L or L¹ is an acid-labile linker. In certain cases, the linker cleaves at a pH of 6 or less, such as, 6.0, 5.95, 5.9, 5.85, 5.8, 5.75, 5.7, 5.65, 5.6, 5.55, 5.5, 5.45, 5.4, 5.35, 5.3, 5.25, 5.2, 5.15, 5.1, 5.05, 5.0, 4.9, 4.85, 4.80, 4.75, 4.7, 4.65, 4.6, 4.55, 4.5 or even less.

[0216] In certain cases, L or L¹ is a photocleavable linker. Suitable photocleavable linkers include ortho-nitrobenzyl-based linkers, phenacyl linkers, alkoxybenzoin linkers, chromium arene complex linkers, NpSSMpact linkers and pivaloylglycol linkers, as described in Guillier et al. (Chem. Rev. 2000 1000:2091-2157).

[0217] In some cases, L or L¹ is a proteolytically cleavable linker.

[0218] The proteolytically cleavable linker can include a protease recognition sequence recognized by a protease selected from the group consisting of alanine carboxypeptidase, Armillaria mellea astacin, bacterial leucyl aminopeptidase, cancer procoagulant, cathepsin B, clostripain, cytosol alanyl aminopeptidase, elastase, endoproteinase Arg-C, enterokinase, gastricsin, gelatinase, Gly-X carboxypeptidase, glycyl endopeptidase, human rhinovirus 3C protease, hypodermin C, IgA-specific serine endopeptidase, leucyl aminopeptidase, leucyl endopeptidase, lysC, lysosomal pro-X carboxypeptidase, lysyl aminopeptidase, methionyl aminopeptidase, myxobacter, nardilysin, pancreatic endopeptidase E, picornain 2A, picornain 3C, proendopeptidase, prolyl aminopeptidase, proprotein convertase I, proprotein convertase II, russellysin, saccharopepsin, semenogelase, T-plasminogen activator, thrombin, tissue kallikrein, tobacco etch virus (TEV), togavirin, tryptophanyl aminopeptidase, U-plasminogen activator, V8, venombin A, venombin AB, and Xaa-pro aminopeptidase.

[0219] For example, the proteolytically cleavable linker can comprise a matrix metalloproteinase cleavage site, e.g., a cleavage site for a MMP selected from collagenase-1, -2, and -3 (MMP-1, -8, and -13), gelatinase A and B (MMP-2 and -9), stromelysin 1, 2, and 3 (MMP-3, -10, and -11), matrilysin (MMP-7), and membrane metalloproteinases (MT1-MMP and MT2-MMP). For example, the cleavage sequence of MMP-9 is Pro-X-X-Hy (SEQ ID NO: 1054) (wherein, X represents an arbitrary residue; Hy, a hydrophobic residue), e.g., Pro-X-X-Hy-(Ser/Thr) (SEQ ID NO: 847), e.g., Pro-Leu/Gln-Gly-Met-Thr-Ser (SEQ ID NO:848) or Pro-Leu/Gln-Gly-Met-Thr (SEQ ID NO:849). Another example of a protease cleavage site is a plasminogen activator cleavage site, e.g., a uPA or a tissue plasminogen activator (tPA) cleavage site. In some cases, the cleavage site is a furin cleavage site. Specific examples of cleavage sequences of uPA and tPA include sequences comprising Val-Gly-Arg. Another example of a protease cleavage site that can be included in a proteolytically cleavable linker is a tobacco etch virus (TEV) protease cleavage site, e.g., ENLYTQS (SEQ ID NO:850), where the protease cleaves between the glutamine and the serine. TEV protease recognizes a linear amino acid sequence of the general formula EX₁X2YX₃Q(G/S) (SEQ ID NO:), where each of X₁, X₂, and X₃ is any amino acid, and where cleavage occurs between Q and G or Q and S. A TEV protease-cleavable linker can include, ENLYFQG (SEQ ID NO:957); ENLYTQS (SEQ ID NO:958); ENLYFQGGY (SEQ ID NO:959); ENLYFQS (SEQ ID NO:960); and the like. Another example of a protease cleavage site that can be included in a proteolytically cleavable linker is an enterokinase cleavage site, e.g., DDDDK (SEQ ID NO:851), where cleavage occurs after the lysine residue. Another example of a protease cleavage site that can be included in a proteolytically cleavable linker is a thrombin cleavage site, e.g., LVPR (SEQ ID NO:852). Additional suitable linkers comprising protease cleavage sites include linkers comprising one or more of the following amino acid sequences: LEVLFQGP (SEQ ID NO:853), cleaved by PreScission protease (a fusion protein comprising human rhinovirus 3C protease and glutathione-S-transferase; Walker et al. (1994) Biotechnol. 12:601); a thrombin cleavage site, e.g., CGLVPAGSGP (SEQ ID NO:854); SLLKSRMVPNFN (SEQ ID NO:855) or SLLIARRMPNFN (SEQ ID NO:856), cleaved by cathepsin B; SKLVQASASGVN (SEQ ID NO:857) or SSYLKASDAPDN (SEQ ID NO:858), cleaved by an Epstein-Barr virus protease; RPKPQQFFGLMN (SEQ ID NO:859) cleaved by MMP-3 (stromelysin); SLRPLALWRSFN (SEQ ID NO:860) cleaved by MMP-7 (matrilysin); SPQGIAGQRNFN (SEQ ID NO:861) cleaved by MMP-9; DVDERDVRGFASFL SEQ ID NO:862) cleaved by a thermolysin-like MMP; SLPLGLWAPNFN (SEQ ID NO:863) cleaved by matrix metalloproteinase 2(MMP-2); SLLIFRSWANFN (SEQ ID NO:864) cleaved by cathespin L; SGVVIATVIVIT (SEQ ID NO:865) cleaved by cathepsin D; SLGPQGIWGQFN (SEQ ID NO:866) cleaved by matrix metalloproteinase 1(MMP-1); KKSPGRVVGGSV (SEQ ID NO:867) cleaved by urokinase-type plasminogen activator; PQGLLGAPGILG (SEQ ID NO:868) cleaved by membrane type 1 matrixmetalloproteinase (MT-MMP); HGPEGLRVGFYESDVMGRGHARLVHVEEPHT (SEQ ID NO:869) cleaved by stromelysin 3 (or MMP-11), thermolysin, fibroblast collagenase and stromelysin-1; GPQGLAGQRGIV (SEQ ID NO:870) cleaved by matrix metalloproteinase 13 (collagenase-3); GGSGQRGRKALE (SEQ ID NO:871) cleaved by tissue-type plasminogen activator(tPA); SLSALLSSDIFN (SEQ ID NO:872) cleaved by human prostate-specific antigen; SLPRFKIIGGFN (SEQ ID NO:873) cleaved by kallikrein (hK3); SLLGIAVPGNFN (SEQ ID NO:874) cleaved by neutrophil elastase; and FFKNIVTPRTPP (SEQ ID NO:875) cleaved by calpain (calcium activated neutral protease).

[0220] In some cases, the linker comprises a disulfide bond and is cleavable under reducing conditions, e.g., using β-mercaptoethanol, cysteine-HCl, Tris (2-carboxyethyDl phosphine hydrochloride. or another reducing agent.

[0221] In some cases, the linker comprises a dipeptide such as a valine-citrulline dipeptide or a valine-lysine dipeptide.

### Biomolecules

[0222] Biomolecules that are suitable for use in a method or conjugate of the present disclosure include polypeptides, polynucleotides, carbohydrates, lipids, fatty acids, steroids, purines, pyrimidines, derivatives, structural analogs thereof and combinations thereof.

[0223] Suitable biomolecules include, but are not limited to, polypeptides, nucleic acids, glycoproteins, small molecules, carbohydrates, lipids, glycolipids, lipoproteins, lipopolysaccharides, sugars, amino acids, organic dyes, synthetic polymers, and the like.

[0224] Suitable lipids include, e.g., 3-N-[(methoxypoly(ethylene glycol) 2000) carbamoyl]-1,2-dimyristyloxy-propylamine (PEG-C-DMA), 1,2-dilinoleyloxy-N,N-dimethyl-3-aminopropane (DLinDMA), 1,2-distearoyl-sn-glycero-3-phosphocholine (DSPC), cholesterol, dipalmitoylphosphatidylcholine, 3-N-[(w-methoxy poly(ethylene glycol)2000)carbamoyl]-1,2-dimyrestyloxypropylamine, 1,2-dilinoleyloxy-3-N,Ndimethylaminopropane, 1,2-distearoyl-sn-glycero-3-phosphocholine, PEG-cDMA, 1,2-dilinoleyloxy-3-(N;N-dimethyl)aminopropane (DLinDMA), 2,2-dilinoleyl-4-dimethylaminoethyl-[1,3]-dioxolane (DLin-KC2-DMA), and the like.

[0225] Suitable biomolecules include affinity moieties. Suitable affinity moieties include His5 (HHHHH) (SEQ ID NO:876); HisX6 (HHHHHH) (SEQ ID NO:877); c-myc (EQKLISEEDL) (SEQ ID NO:878); Flag (DYKDDDDK) (SEQ ID NO:879); StrepTag (WSHPQFEK) (SEQ ID NO:880); hemagglutinin, e.g., HA Tag (YPYDVPDYA) (SEQ ID NO:881); glutathione-S-transferase (GST); thioredoxin; cellulose binding domain, RYIRS (SEQ ID NO:882); Phe-His-His-Thr (SEQ ID NO:883); chitin binding domain; S-peptide; T7 peptide; SH2 domain; C-end RNA tag, WEAAAREACCRECCARA (SEQ ID NO:884); metal binding domains, e.g., zinc binding domains or calcium binding domains such as those from calcium-binding proteins, e.g., calmodulin, troponin C, calcineurin B, myosin light chain, recoverin, S-modulin, visinin, VILIP, neurocalcin, hippocalcin, frequenin, caltractin, calpain large-subunit.S100 proteins. parvalbumin, calbindin D9K, calbindin D28K, and calretinin; biotin; streptavidin; MyoD; leucine zipper polypeptides; and maltose binding protein. In some cases, a suitable biomolecule is biotin.

[0226] In some cases, a biomolecule suitable for conjugating to a target polypeptide is a dimerization domain. Non-limiting examples of suitable dimerization domains include polypeptides of the following dimerization pairs:
[0227] a) FK506 binding protein (FKBP) and FKBP;
[0228] b) FKBP and calcineurin catalytic subunit A (CnA);
[0229] c) FKBP and cyclophilin;
[0230] d) FKBP and FKBP-rapamycin associated protein (FRB);
[0231] e) gyrase B (GyrB) and GyrB;
[0232] f) dihydrofolate reductase (DHFR) and DHFR;
[0233] g) DmrB and DmrB;
[0234] h) PYL and ABI;
[0235] i) Cry2 and CIB1; and
[0236] j) GAI and GID1.

[0237] For example, in some cases, the biomolecule is a polypeptide comprising at least about 85%, at least about 90%, at least about 95%, at least about 98%, or 100% amino acid sequence identity to the following amino acid FKBP amino acid sequence:

(SEQ ID NO: 885)
MGVQVETISPGDGRTFPKRGQTCVVHYTGMLEDGKKFDSSRDRNKPFKFM
LGKQEVIRGWEEGVAQMSVGQRAKLTISPDYAYGATGHPGIIPPHATLVF
DVELLKLE.

[0238] In some cases, a biomolecule suitable for conjugating to a target polypeptide is a member of a specific binding pair. Specific binding pairs include, e.g.: i) antibody-antigen; ii) cell adhesion molecule-extracellular matrix; iii) ligand-receptor; iv) biotin-avidin; and the like.

[0239] Suitable synthetic polymers include, but are not limited to, polyalkylenes such as polyethylene and polypropylene and polyethyleneglycol (PEG); polychloroprene; polyvinyl ethers such as poly(vinyl acetate); polyvinyl halides such as poly(vinyl chloride); polysiloxanes; polystyrenes; polyurethanes; polyacrylates such as poly(methyl (meth)acrylate), poly(ethyl (meth)acrylate), poly(n-butyl(meth)acrylate), poly(isobutyl (meth)acrylate), poly(tert-butyl (meth)acrylate), poly(hexyl(meth)acrylate), poly(isodecyl (meth)acrylate), poly(lauryl (meth)acrylate), poly(phenyl (meth)acrylate), poly(methyl acrylate), poly(isopropyl acrylate), poly(isobutyl acrylate), and poly(octadecyl acrylate); polyacrylamides such as poly(acrylamide), poly(methacrylamide), poly(ethyl acrylamide), poly(ethyl methacrylamide), poly(N-isopropyl acrylamide), poly(n, iso, and tert-butyl acrylamide); and copolymers and mixtures thereof.

[0240] In some cases, a biomolecule to be conjugated to a target polypeptide is a polypeptide. Suitable polypeptides include, e.g., fluorescent proteins; receptors; enzymes; structural proteins; affinity tags; and the like.

[0241] Suitable fluorescent proteins include, but are not limited to, green fluorescent protein (GFP) or variants thereof, blue fluorescent variant of GFP (BFP), cyan fluorescent variant of GFP (CFP), yellow fluorescent variant of GFP (YFP), enhanced GFP (EGFP), enhanced CFP (ECFP), enhanced YFP (EYFP), GFPS65T, Emerald, Topaz (TYFP), Venus, Citrine, mCitrine, GFPuv, destabilized EGFP (dEGFP), destabilized ECFP (dECFP), destabilized EYFP (dEYFP), mCFPm, Cerulean, T-Sapphire, CyPet, YPet, mKO, HcRed, t-HcRed, DsRed, DsRed2, DsRed-monomer, J-Red, dimer2, t-dimer2(12), mRFP1, pocilloporin, Renilla GFP, Monster GFP, paGFP, Kaede protein and kindling protein, Phycobiliproteins and Phycobiliprotein conjugates including B-Phycoerythrin, R-Phycoerythrin and Allophycocyanin. Other examples of fluorescent proteins include mHoneydew, mBanana, mOrange, dTomato, tdTomato, mTangerine, mStrawberry, mCherry, mGrape1, mRaspberry, mGrape2, mPlum (Shaner et al. (2005) Nat. Methods 2:905-909), and the like. Any of a variety of fluorescent and colored proteins from Anthozoan species, as described in, e.g., Matz et al. (1999) Nature Biotechnol. 17:969-973, is suitable for use.

[0242] In some cases, the biomolecule is an antibody. Suitable antibodies are described elsewhere herein. The antibody can be any antigen-binding antibody-based polypeptide, a wide variety of which are known in the art. In some instances, the antibody is a single chain Fv (scFv). Other antibody-based recognition domains (cAb VHH (camelid antibody variable domains) and humanized versions, IgNAR VH (shark antibody variable domains) and humanized versions, sdAb VH (single domain antibody variable domains) and “camelized” antibody variable domains are suitable for use. In some instances, T-cell receptor (TCR) based recognition domains such as single chain TCR (scTv, single chain two-domain TCR containing VaVp) are also suitable for use.

[0243] An antibody can be specific for an antigen such as CD19, CD20, CD38, CD30, Her2/neu, ERBB2, CA125, MUC-1, prostate-specific membrane antigen (PSMA), CD44 surface adhesion molecule, mesothelin, carcinoembryonic antigen (CEA), epidermal growth factor receptor (EGFR), EGFRvIII, vascular endothelial growth factor receptor-2 (VEGFR2), high molecular weight-melanoma associated antigen (HMW-MAA), MAGE-A1, IL-13R-a2, GD2, and the like. In some cases, the antibody is specific for a cytokine. In some cases, the antibody is specific for a cytokine receptor. In some cases, the antibody is specific for a growth factor. In some cases, the antibody is specific for a growth factor receptor. In some cases, the antibody is specific for a cell-surface receptor. In some cases, the antibody is an anti-CD3 antibody.

[0244] In some cases, both the target molecule and the biomolecule are antibodies. In some cases, the target molecule is a first antibody specific for a first antigen, and the biomolecule is a second antibody specific for a second antigen. The first antigen can the second antigen can be completely separate molecules. For example, the first antigen can be a first polypeptide and the second antigen can be a second polypeptide. The first antigen can be a first epitope displayed by an antigen, and the second antigen can be a second epitope displayed by the same antigen. The resulting conjugate can be a bispecific antibody.

[0245] In some cases, the biomolecule confers a property such as: i) increased serum half-life; ii) increased immunogenicity; iii) enhanced pharmacokinetic properties; iv) increased transport across the blood-brain barrier; and the like, on a target biomolecule. For example, in some cases, a biomolecule that increases serum half-life is human serum albumin. In some cases, a biomolecule that increases serum half-life is an albumin-binding domain. In some cases, a biomolecule that increases serum half-life is transthyretin. In some cases, a biomolecule that increases serum half-life is a thyroxin-binding protein. In some cases, the biomolecule is an immunoglobulin Fc polypeptide. In some cases, a biomolecule that facilitates transport across the blood-brain barrier is transferrin receptor (TR), insulin receptor (HIR), insulin-like growth factor receptor (IGFR), low-density lipoprotein receptor related proteins 1 and 2 (LPR-1 and 2), diphtheria toxin receptor, a llama single domain antibody, a protein transduction domain, TAT, penetratin, or a poly-arginine peptide.

[0246] Suitable biomolecules include small molecules such as cancer chemotherapeutic agents. Suitable cancer chemotherapeutic agents include, e.g., alkylating agents, such as nitrogen mustards (for example, chlorambucil, chlormethine, cyclophosphamide, ifosfamide, and melphalan); nitrosoureas (for example, carmustine, fotemustine, lomustine, and streptozocin); platinum compounds (for example, carboplatin, cisplatin, oxaliplatin, and BBR3464); busulfan; dacarbazine; mechlorethamine; procarbazine; temozolomide; thiotepa; uramustine; antimetabolites, such as folic acid (for example, methotrexate, pemetrexed, and raltitrexed); purine (for example, cladribine, clofarabine, fludarabine, mercaptopurine, and tioguanine); pyrimidine (for example, capecitabine); cytarabine; fluorouracil; gemcitabine; plant alkaloids, such as podophyllum (for example, etoposide, and teniposide), taxane (for example, docetaxel and paclitaxel), vinca (for example, vinblastine, vincristine, vindesine, and vinorelbine); cytotoxic/antitumor antibiotics, such as anthracycline family members (for example, daunorubicin, doxorubicin, epirubicin, idarubicin, mitoxantrone, and valrubicin), bleomycin, rifampicin, hydroxyurea, and mitomycin; topoisomerase inhibitors, such as topotecan and irinotecan; photosensitizers, such as aminolevulinic acid, methyl aminolevulinate, porfimer sodium, and verteporfin; and other agents, such as alitretinoin, altretamine, amsacrine, anagrelide, arsenic trioxide, asparaginase, axitinib, bexarotene, bevacizumab, bortezomib, celecoxib, denileukin diftitox, erlotinib, estramustine, gefitinib, hydroxycarbamide, imatinib, lapatinib, pazopanib, pentostatin, masoprocol, mitotane, pegaspargase, tamoxifen, sorafenib, sunitinib, vemurafinib, vandetanib, and tretinoin. For example, in some cases, the target molecule is an antibody; and the biomolecule is a cancer chemotherapeutic agent.

[0247] Suitable biomolecules include cytokines, chemokines, peptide hormones, and the like. Suitable biomolecules include, e.g., interferons (e.g., IFN-γ); interleukins (e.g., IL-1α, IL-1β, IL-2, IL-4, IL-5, IL-6, IL-7, IL-9, IL-10, IL-12p40, IL-12p70, IL-13, IL-15, IL-17, and the like); IP-10, KC, MCP-1, MIP-1α, MIP-10, M-CSF MIP-2, MIG; an alpha chemokine (e.g., a CXC chemokine; e.g., CXC-1 through CXC-17); a beta chemokine (a CC chemokine) such as RANTES or CCL20 (also known as MIP-3a); tumor necrosis factor-alpha (TNF-α); eotaxin; granulocyte colony stimulating factor (G-CSF); granulocyte-macrophage-colony stimulating factor (GM-CSF); erythropoietin; insulin; Gro-α; Groβ; Gro-γ; stromal-derived factor; platelet-derived growth factor (PDGF); vascular endothelial growth factor (VEGF); insulin-like growth factor (IGF); fibroblast growth factor (FGF); epidermal growth factor (EGF); leukemia inhibitory factor (LIF); hepatocyte growth factor (HGF); thrombopoietin; and the like.

[0248] Suitable biomolecules include nucleic acids. In some cases, the nucleic acid is a DNA molecule. In some cases, the nucleic acid is an RNA molecule. In some cases, the nucleic acid comprises both deoxyribonucleotides and ribonucleotides. In some cases, the nucleic acid is a single-stranded DNA molecule. In some cases, the nucleic acid is a double-stranded DNA molecule. In some cases, the nucleic acid is a single-stranded RNA molecule. Suitable nucleic acids include, e.g., a small interfering RNA (siRNA), a short hairpin RNA (shRNA), a microRNA (miRNA), a ribozyme, and the like. Suitable nucleic acids include nucleic acids that are or act as siRNAs or other RNA interference reagents (RNAi agents or iRNA agents), shRNA, antisense oligonucleotides, self-cleaving RNAs, ribozymes, fragment thereof and/or variants thereof (such as Peptidyl transferase 23S rRNA, RNase P, Group I and Group II introns, GIR1 branching ribozymes, Leadzyme, Hairpin ribozymes, Hammerhead ribozymes, HDV ribozymes, Mammalian CPEB3 ribozyme, VS ribozymes, glmS ribozymes, CoTC ribozyme, etc.), microRNAs, microRNA mimics, supermirs, aptamers, antimirs, antagomirs, U1 adaptors, triplex-forming oligonucleotides, RNA activators, long non-coding RNAs, short non-coding RNAs (e.g., piRNAs), immunomodulatory oligonucleotides (such as immunostimulatory oligonucleotides, immunoinhibitory oligonucleotides), GNA, LNA, ENA, PNA, TNA, HNA, TNA, XNA, HeNA, CeNA, morpholinos, G-quadruplex (RNA and DNA), antiviral oligonucleotides, and decoy oligonucleotides. Nucleic acids can be of any length, and can include one or more of a modified ribonucleotide base, a modified deoxyribonucleotide base, a modified deoxyribose, a modified ribose, and a modified backbone linkage (e.g., a phosphorothioate linkage).

### Biomolecules for Conjugation to a CRISPR-Cas Effector Polypeptide

[0249] In some cases, a biomolecule to be conjugated to a target polypeptide is a biomolecule suitable for conjugation to a CRISPR-Cas effector polypeptide.

[0250] In some cases, a biomolecule suitable for conjugation to a CRISPR-Cas effector polypeptide is one that can modulate transcription (e.g., inhibit transcription, increase transcription) of a target DNA. For example, in some cases the biomolecule is a protein (or a domain from a protein) that inhibits transcription (e.g., a transcriptional repressor, a protein that functions via recruitment of transcription inhibitor proteins, modification of target DNA such as methylation, recruitment of a DNA modifier, modulation of histones associated with target DNA, recruitment of a histone modifier such as those that modify acetylation and/or methylation of histones, and the like). In some cases the biomolecule is a protein (or a domain from a protein) that increases transcription (e.g., a transcription activator, a protein that acts via recruitment of transcription activator proteins, modification of target DNA such as demethylation, recruitment of a DNA modifier, modulation of histones associated with target DNA, recruitment of a histone modifier such as those that modify acetylation and/or methylation of histones, and the like).

[0251] In some cases, a biomolecule suitable for conjugation to a CRISPR-Cas effector polypeptide is a polypeptide that has enzymatic activity that modifies a target nucleic acid (e.g., nuclease activity such as FokI nuclease activity, methyltransferase activity, demethylase activity, DNA repair activity, DNA damage activity, deamination activity, dismutase activity, alkylation activity, depurination activity, oxidation activity, pyrimidine dimer forming activity, integrase activity, transposase activity, recombinase activity, polymerase activity, ligase activity, helicase activity, photolyase activity or glycosylase activity).

[0252] In some cases, a biomolecule suitable for conjugation to a CRISPR-Cas effector polypeptide is a polypeptide that has enzymatic activity that modifies a polypeptide (e.g., a histone) associated with a target nucleic acid (e.g., methyltransferase activity, demethylase activity, acetyltransferase activity, deacetylase activity, kinase activity, phosphatase activity, ubiquitin ligase activity, deubiquitinating activity, adenylation activity, deadenylation activity, SUMOylating activity, deSUMOylating activity, ribosylation activity, deribosylation activity, myristoylation activity or demyristoylation activity).

[0253] Examples of proteins (or fragments thereof) that can be used in increase transcription, and that are suitable as a biomolecule for conjugation to a CRISPR-Cas effector polypeptide, include but are not limited to: transcriptional activators such as VP16, VP64, VP48, VP160, p65 subdomain (e.g., from NFkB), and activation domain of EDLL and/or TAL activation domain (e.g., for activity in plants); histone lysine methyltransferases such as SET1A, SET1B, MLL1 to 5, ASH1, SYMD2, NSD1, and the like; histone lysine demethylases such as JHDM2a/b, UTX, JMJD3, and the like; histone acetyltransferases such as GCN5, PCAF, CBP, p300, TAF1, TIP60/PLIP, MOZ/MYST3, MORF/MYST4, SRC1, ACTR, P160, CLOCK, and the like; and DNA demethylases such as Ten-Eleven Translocation (TET) dioxygenase 1 (TET1CD), TETI, DME, DML1, DML2, ROS1, and the like.

[0254] Examples of proteins (or fragments thereof) that can be used in decrease transcription, and that are suitable as a biomolecule suitable for conjugation to a CRISPR-Cas effector polypeptide, include but are not limited to: transcriptional repressors such as the Kruppel associated box (KRAB or SKD); KOX1 repression domain; the Mad mSIN3 interaction domain (SID); the ERF repressor domain (ERD), the SRDX repression domain (e.g., for repression in plants), and the like; histone lysine methyltransferases such as Pr-SET7/8, SUV4-20H1, RIZ1, and the like; histone lysine demethylases such as JMJD2A/JHDM3A, JMJD2B, JMJD2C/GASC1, JMJD2D, JARID1A/RBP2, JARID1B/PLU-1, JARID1C/SMCX, JARID1D/SMCY, and the like; histone lysine deacetylases such as HDAC1, HDAC2, HDAC3, HDAC8, HDAC4, HDAC5, HDAC7, HDAC9, SIRT1, SIRT2, HDAC11, and the like; DNA methylases such as HhaI DNA m5c-methyltransferase (M.HhaI), DNA methyltransferase 1 (DNMT1), DNA methyltransferase 3a (DNMT3a), DNA methyltransferase 3b (DNMT3b), METI, DRM3 (plants), ZMET2, CMT1, CMT2 (plants), and the like; and periphery recruitment elements such as Lamin A, Lamin B, and the like.

[0255] In some cases, a biomolecule to be conjugated to a CRISPR-Cas effector polypeptide has enzymatic activity that modifies a target nucleic acid (e.g., ssRNA, dsRNA, ssDNA, dsDNA). Examples of enzymatic activity that can be provided by the biomolecule include but are not limited to: nuclease activity such as that provided by a restriction enzyme (e.g., FokI nuclease), methyltransferase activity such as that provided by a methyltransferase (e.g., HhaI DNA m5c-methyltransferase (M.HhaI), DNA methyltransferase 1 (DNMT1), DNA methyltransferase 3a (DNMT3a), DNA methyltransferase 3b (DNMT3b), METI, DRM3 (plants), ZMET2, CMT1, CMT2 (plants), and the like); demethylase activity such as that provided by a demethylase (e.g., Ten-Eleven Translocation (TET) dioxygenase 1 (TET1CD), TETI, DME, DML1, DML2, ROS1, and the like), DNA repair activity, DNA damage activity, deamination activity such as that provided by a deaminase (e.g., a cytosine deaminase enzyme such as rat APOBEC1), dismutase activity, alkylation activity, depurination activity, oxidation activity, pyrimidine dimer forming activity, integrase activity such as that provided by an integrase and/or resolvase (e.g., Gin invertase such as the hyperactive mutant of the Gin invertase, GinH106Y; human immunodeficiency virus type 1 integrase (IN); Tn3 resolvase; and the like), transposase activity, recombinase activity such as that provided by a recombinase (e.g., catalytic domain of Gin recombinase), polymerase activity, ligase activity, helicase activity, photolyase activity, and glycosylase activity).

[0256] In some cases, a biomolecule to be conjugated to a CRISPR-Cas effector polypeptide has enzymatic activity that modifies a protein associated with a target nucleic acid (e.g., ssRNA, dsRNA, ssDNA, dsDNA) (e.g., a histone, an RNA binding protein, a DNA binding protein, and the like). Examples of enzymatic activity (that modifies a protein associated with a target nucleic acid) that can be provided by the biomolecule include but are not limited to: methyltransferase activity such as that provided by a histone methyltransferase (HMT) (e.g., suppressor of variegation 3-9 homolog 1 (SUV39H1, also known as KMT1A), euchromatic histone lysine methyltransferase 2 (G9A, also known as KMT1C and EHMT2), SUV39H2, ESET/SETDB1, and the like, SET1A, SET1B, MLL1 to 5, ASH1, SYMD2, NSD1, DOT1L, Pr-SET7/8, SUV4-20H1, EZH2, RIZ1), demethylase activity such as that provided by a histone demethylase (e.g., Lysine Demethylase 1A (KDM1A also known as LSD1), JHDM2a/b, JMJD2A/JHDM3A, JMJD2B, JMJD2C/GASC1, JMJD2D, JARID1A/RBP2, JARID1B/PLU-1, JARID1C/SMCX, JARID1D/SMCY, UTX, JMJD3, and the like), acetyltransferase activity such as that provided by a histone acetyl transferase (e.g., catalytic core/fragment of the human acetyltransferase p300, GCN5, PCAF, CBP, TAF1, TIP60/PLIP, MOZ/MYST3, MORF/MYST4, HBO1/MYST2, HMOF/MYST1, SRC1, ACTR, P160, CLOCK, and the like), deacetylase activity such as that provided by a histone deacetylase (e.g., HDAC1, HDAC2, HDAC3, HDAC8, HDAC4, HDAC5, HDAC7, HDAC9, SIRT1, SIRT2, HDAC11, and the like), kinase activity, phosphatase activity, ubiquitin ligase activity, deubiquitinating activity, adenylation activity, deadenylation activity, SUMOylating activity, deSUMOylating activity, ribosylation activity, deribosylation activity, myristoylation activity, and demyristoylation activity.

[0257] In some cases, a biomolecule to be conjugated to a CRISPR-Cas effector polypeptide is a catalytically active endonuclease. For example, in some cases, the target polypeptide is a CRISPR-Cas effector polypeptide that is catalytically inactive (e.g., does not exhibit endonuclease activity) and that retains target nucleic acid binding activity (when complexed with a guide RNA); and the biomolecule to be conjugated to the CRISPR-Cas effector polypeptide is a catalytically active endonuclease. For example, in some cases, the catalytically active endonuclease is a FokI polypeptide. As one non-limiting example, in some cases, a biomolecule to be conjugated to a CRISPR-Cas effector polypeptide is a FokI nuclease comprising an amino acid sequence having at least at least 85%, at least 90%, at least 95%, at least 98%, at least 99%, or 100%, amino acid sequence identity to the FokI amino acid sequence provided below; where the FokI nuclease has a length of from about 195 amino acids to about 200 amino acids.

### FokI Nuclease Amino Acid Sequence:

(SEQ ID NO: 886)
QLVKSELEEKKSELRHKLKYVPHEYIELIEIARNSTQDRILEMKVMEFFM
KVYGYRGKHLGGSRKPDGAIYTVGSPIDYGVIVDTKAYSGGYNLPIGQAD
EMQRYVEENQTRNKHINPNEWWKVYPSSVTEFKFLFVSGHFKGNYKAQLT
RLNHITNCNGAVLSVEELLIGGEMIKAGTLTLEEVRRKFNNGEINF.

[0258] In some cases, the biomolecule to be conjugated to a CRISPR-Cas effector polypeptide is a deaminase. In some cases, the target CRISPR/Cas effector polypeptide is catalytically inactive. Suitable deaminases include a cytidine deaminase and an adenosine deaminase.

[0259] A suitable adenosine deaminase is any enzyme that is capable of deaminating adenosine in DNA. In some cases, the deaminase is a TadA deaminase.

[0260] In some cases, a suitable adenosine deaminase comprises an amino acid sequence having at least 80%, at least 85%, at least 90%, at least 95%, at least 98%, at least 99%, or 100%, amino acid sequence identity to the following amino acid sequence:

(SEQ ID NO: 887)
MSEVEFSHEYWMRHALTLAKRAWDEREVPVGAVLVHNNRVIGEGWNRPIG
RHDPTAHAEIMALRQGGLVMQNYRLIDATLYVTLEPCVMCAGAMIHSRIG
RVVFGARDAKTGAAGSLMDVLHHPGMNHRVEITEGILADECAALLSDFFR
MRRQEIKAQKKAQSSTD

[0261] In some cases, a suitable adenosine deaminase comprises an amino acid sequence having at least 80%, at least 85%, at least 90%, at least 95%, at least 98%, at least 99%, or 100%, amino acid sequence identity to the following amino acid sequence:

(SEQ ID NO: 888)
MRRAFITGVFFLSEVEFSHEYWMRHALTLAKRAWDEREVPVGAVLVHNNR
VIGEGWNRPIGRHDPTAHAEIMALRQGGLVMQNYRLIDATLYVTLEPCVM
CAGAMIHSRIGRVVFGARDAKTGAAGSLMDVLHHPGMNHRVEITEGILAD
ECAALLSDFFRMRRQEIKAQKKAQSSTD.

[0262] In some cases, a suitable adenosine deaminase comprises an amino acid sequence having at least 80%, at least 85%, at least 90%, at least 95%, at least 98%, at least 99%, or 100%, amino acid sequence identity to the following Staphylococcus aureus TadA amino acid sequence:

(SEQ ID NO: 889)
MGSHMTNDIYFMTLAIEEAKKAAQLGEVPIGAIITKDDEVIARAHNLRET
LQQPTAHAEHIAIERAAKVLGSWRLEGCTLYVTLEPCVMCAGTIVMSRIP
RVVYGADDPKGGCSGSLMNLLQQSNFNHRAIVDKGVLKEACSTLLTTFFK
NLRANKKSTN:

[0263] In some cases, a suitable adenosine deaminase comprises an amino acid sequence having at least 80%, at least 85%, at least 90%, at least 95%, at least 98%, at least 99%, or 100%, amino acid sequence identity to the following Bacillus subtilis TadA amino acid sequence:

(SEQ ID NO: 890)
MTQDELYMKEAIKEAKKAEEKGEVPIGAVLVINGEIIARAHNLRETEQRS
IAHAEMLVIDEACKALGTWRLEGATLYVTLEPCPMCAGAVVLSRVEKVVF
GAFDPKGGCSGTLMNLLQEERFNHQAEVVSGVLEEECGGMLSAFFRELRK
KKKAARKNLSE

[0264] In some cases, a suitable adenosine deaminase comprises an amino acid sequence having at least 80%, at least 85%, at least 90%, at least 95%, at least 98%, at least 99%, or 100%, amino acid sequence identity to the following Salmonella typhimurium TadA:

(SEQ ID NO: 891)
MPPAFITGVTSLSDVELDHEYWMRHALTLAKRAWDEREVPVGAVLVHNHR
VIGEGWNRPIGRHDPTAHAEIMALRQGGLVLQNYRLLDTTLYVTLEPCVM
CAGAMVHSRIGRVVFGARDAKTGAAGSLIDVLHHPGMNHRVEIIEGVLRD
ECATLLSDFFRMRRQEIKALKKADRAEGAGPAV

[0265] In some cases, a suitable adenosine deaminase comprises an amino acid sequence having at least 80%, at least 85%, at least 90%, at least 95%, at least 98%, at least 99%, or 100%, amino acid sequence identity to the following Shewanella putrefaciens TadA amino acid sequence:

(SEQ ID NO: 892)
MDEYWMQVAMQMAEKAEAAGEVPVGAVLVKDGQQIATGYNLSISQHDPTA
HAEILCLRSAGKKLENYRLLDATLYITLEPCAMCAGAMVHSRIARVVYGA
RDEKTGAAGTVVNLLQHPAFNHQVEVTSGVLAEACSAQLSRFFKRRRDEK
KALKLAQRAQQGIE

[0266] In some cases, a suitable adenosine deaminase comprises an amino acid sequence having at least 80%, at least 85%, at least 90%, at least 95%, at least 98%, at least 99%, or 100%, amino acid sequence identity to the following Haemophilus influenzae F3031 TadA amino acid sequence:

(SEQ ID NO: 893)
MDAAKVRSEFDEKMMRYALELADKAEALGEIPVGAVLVDDARNIIGEGWN
LSIVQSDPTAHAEIIALRNGAKNIQNYRLLNSTLYVTLEPCTMCAGAILH
SRIKRLVFGASDYKTGAIGSRFHFFDDYKMNHTLEITSGVLAEECSQKLS
TFFQKRREEKKIEKALLKSLSDK

[0267] In some cases, a suitable adenosine deaminase comprises an amino acid sequence having at least 80%, at least 85%, at least 90%, at least 95%, at least 98%, at least 99%, or 100%, amino acid sequence identity to the following Caulobacter crescentus TadA amino acid sequence:

(SEQ ID NO: 894)
MRTDESEDQDHRMMRLALDAARAAAEAGETPVGAV
ILDPSTGEVIATAGNGPIAAHDPTAHAEIAAMRAA
AAKLGNYRLTDLTLVVTLEPCAMCAGAISHARIGR
VVFGADDPKGGAVVHGPKFFAQPTCHWRPEVTGGV
LADESADLLRGFFRARRKAKI

[0268] In some cases, a suitable adenosine deaminase comprises an amino acid sequence having at least 80%, at least 85%, at least 90%, at least 95%, at least 98%, at least 99%, or 100%, amino acid sequence identity to the following Geobacter sulfurreducens TadA amino acid sequence:

(SEQ ID NO: 895)
MSSLKKTPIRDDAYWMGKAIREAAKAAARDEVPIG
AVIVRDGAVIGRGHNLREGSNDPSAHAEMIAIRQA
ARRSANWRLTGATLYVTLEPCLMCMGAIILARLER
VVFGCYDPKGGAAGSLYDLSADPRLNHQVRLSPGV
CQEECGTMLSDFFRDLRRRKKAKATPALFIDERKV
PPEP

[0269] Cytidine deaminases suitable as biomolecules to be conjugated to a CRISPR-Cas effector polypeptide include any enzyme that is capable of deaminating cytidine in DNA.

[0270] In some cases, the cytidine deaminase is a deaminase from the apolipoprotein B mRNA-editing complex (APOBEC) family of deaminases. In some cases, the APOBEC family deaminase is selected from the group consisting of APOBEC1 deaminase, APOBEC2 deaminase, APOBEC3A deaminase, APOBEC3B deaminase, APOBEC3C deaminase, APOBEC3D deaminase, APOBEC3F deaminase, APOBEC3G deaminase, and APOBEC3H deaminase. In some cases, the cytidine deaminase is an activation induced deaminase (AID).

[0271] In some cases, a suitable cytidine deaminase comprises an amino acid sequence having at least 80%, at least 85%, at least 90%, at least 95%, at least 98%, at least 99%, or 100%, amino acid sequence identity to the following amino acid sequence: PGP-79DNA

(SEQ ID NO: 896)
[sequence omitted]

[0272] In some cases, a suitable cytidine deaminase is an AID and comprises an amino acid sequence having at least 80%, at least 85%, at least 90%, at least 95%, at least 98%, at least 99%, or 100%, amino acid sequence identity to the following amino acid sequence: MDSLLMNRRK FLYQFKNVRW AKGRRETYLC YVVKRRDSAT SFSLDFGYLR NKNGCHVELL FLRYISDWDL DPGRCYRVTW FTSWSPCYDC ARHVADFLRG NPNLSLRIFT ARLYFCEDRK AEPEGLRRLH RAGVQIAIMT FKENHERTFK AWEGLHENSV RLSRQLRRIL LPLYEVDDLR DAFRTLGL (SEQ ID NO:897).

[0273] In some cases, a suitable cytidine deaminase is an AID and comprises an amino acid sequence having at least 80%, at least 85%, at least 90%, at least 95%, at least 98%, at least 99%, or 100%, amino acid sequence identity to the following amino acid sequence: [sequence omitted] (SEQ ID NO:898).

[0274] In some cases, a method of the present disclosure for conjugating a biomolecule to a CRISPR-Cas effector polypeptide is carried out in the presence of trehalose. The concentration of trehalose can be from 25 mM to about 100 mM (e.g., from 25 mM to 50 mM, from 50 mM to 100 mM). For example, in some cases, a method of the present disclosure for conjugating a biomolecule to a CRISPR-Cas effector polypeptide is carried out under the following conditions: 20 mM Tris HCl, 300 mM KCl, 50 mM Trehalose pH 7.0, 4° C. 1 hr; 10 μM CRISPR-Cas effector polypeptide.

### Target Molecules

[0275] Target molecules that are suitable for modification include, but are not limited to, polypeptides, polynucleotides, carbohydrates, lipids, glycolipids, glycopolypeptides, and the like. A target molecule to be modified according to a method of the present disclosure comprises, or is modified to comprise, a phenol moiety or catechol moiety.

[0276] In some cases, a target molecule is a polypeptide (a “target polypeptide”).

[0277] Target polypeptides that can be modified using a method of the present disclosure include, but are not limited to, an enzyme, an antibody, a structural polypeptide, a ligand for a receptor, a receptor, and the like. Target polypeptides can include, structural proteins; receptors; enzymes; cell surface proteins; proteins integral to the function of a cell; proteins involved in catalytic activity; proteins involved in motor activity; proteins involved in helicase activity; proteins involved in metabolic processes (anabolism and catabolism); proteins involved in antioxidant activity; proteins involved in proteolysis; proteins involved in biosynthesis; proteins having kinase activity; proteins having oxidoreductase activity; proteins having transferase activity; proteins having hydrolase activity; proteins having lyase activity; proteins having isomerase activity; proteins having ligase activity; proteins having enzyme regulator activity; proteins having signal transducer activity; structural polypeptides; polypeptides having binding activity; receptor polypeptides; proteins involved in cell motility; proteins involved in membrane fusion; proteins involved in cell communication; proteins involved in regulation of biological processes; proteins involved in development; proteins involved in cell differentiation; proteins involved in response to stimulus; behavioral proteins; cell adhesion proteins; proteins involved in cell death; proteins involved in transport (including protein transporter activity, nuclear transport, ion transporter activity, channel transporter activity, and the like); proteins involved in secretion activity; proteins involved in electron transporter activity; proteins involved in pathogenesis; proteins involved in chaperone regulator activity; proteins having nucleic acid binding activity; proteins having transcription regulator activity; proteins involved in extracellular organization; proteins involved in biogenesis; proteins involved in translation regulation; and the like.

[0278] In some cases, the target polypeptide is an antibody. The antibody can be any antigen-binding antibody-based polypeptide, a wide variety of which are known in the art. In some instances, the antibody is a single chain Fv (scFv). Other antibody-based recognition domains (cAb VHH (camelid antibody variable domains) and humanized versions, IgNAR VH (shark antibody variable domains) and humanized versions, sdAb VH (single domain antibody variable domains) and “camelized” antibody variable domains are suitable for use. In some instances, T-cell receptor (TCR) based recognition domains such as single chain TCR (scTv, single chain two-domain TCR containing VaVp) are also suitable for use.

[0279] An antibody can be specific for an antigen such as CD19, CD20, CD38, CD30, Her2/neu, ERBB2, CA125, MUC-1, prostate-specific membrane antigen (PSMA), CD44 surface adhesion molecule, mesothelin, carcinoembryonic antigen (CEA), epidermal growth factor receptor (EGFR), EGFRvIII, vascular endothelial growth factor receptor-2 (VEGFR2), high molecular weight-melanoma associated antigen (HMW-MAA), MAGE-A1, IL-13R-a2, GD2, and the like. In some cases, the antibody is specific for a cytokine. In some cases, the antibody is specific for a cytokine receptor. In some cases, the antibody is specific for a growth factor. In some cases, the antibody is specific for a growth factor receptor. In some cases, the antibody is specific for a cell-surface receptor. In some cases, the antibody is an anti-CD3 antibody.

[0280] In some cases, the antibody is selected from: 806, 9E10, 3F8, 81C6, 8H9, Abagovomab, Abatacept, Abciximab, Abituzumab, Abrilumab, Actoxumab, Adalimumab, Adecatumumab, Aducanumab, Afelimomab, Afutuzumab, Alacizumab pegol, ALD518, Alefacept, Alemtuzumab, Alirocumab, Altumomab pentetate, Amatuximab, AMG 102, Anatumomab mafenatox, Anetumab ravtansine, Anifrolumab, Anrukinzumab, Apolizumab, Arcitumomab, Ascrinvacumab, Aselizumab, Atacicept, Atezolizumab, Atinumab, Atlizumab/tocilizumab, Atorolimumab, AVE1642, Bapineuzumab, Basiliximab, Bavituximab, Bectumomab, Begelomab, Belimumab, Benralizumab, Bertilimumab, Besilesomab, Bevacizumab, Bezlotoxumab, Biciromab, Bimagrumab, Bimekizumab, Bivatuzumab mertansine, Blinatumomab, Blosozumab, BMS-936559, Bococizumab, Brentuximab vedotin, Briakinumab, Brodalumab, Brolucizumab, Brontictuzumab, Canakinumab, Cantuzumab mertansine, Cantuzumab ravtansine, Caplacizumab, Capromab pendetide, Carlumab, Catumaxomab, cBR96-doxorubicin immunoconjugate, CC49, CDP791, Cedelizumab, Certolizumab pegol, Cetuximab, cG250, Ch. 14.18, Citatuzumab bogatox, Cixutumumab, Clazakizumab, Clenoliximab, Clivatuzumab tetraxetan, Codrituzumab, Coltuximab ravtansine, Conatumumab, Concizumab, CP 751871, CR6261, Crenezumab, CS-1008, Dacetuzumab, Daclizumab, Dalotuzumab, Dapirolizumab pegol, Daratumumab, Dectrekumab, Demcizumab, Denintuzumab mafodotin, Denosumab, Derlotuximab biotin, Detumomab, Dinutuximab, Diridavumab, Dorlimomab aritox, Drozitumab, Duligotumab, Dupilumab, Durvalumab, Dusigitumab, Ecromeximab, Eculizumab, Edobacomab, Edrecolomab, Efalizumab, Efungumab, Eldelumab, Elgemtumab, Elotuzumab, Elsilimomab, Emactuzumab, Emibetuzumab, Enavatuzumab, Enfortumab vedotin, Enlimomab pegol, Enoblituzumab, Enokizumab, Enoticumab, Ensituximab, Epitumomab cituxetan, Epratuzumab, Erlizumab, Ertumaxomab, Etanercept, Etaracizumab, Etrolizumab, Evinacumab, Evolocumab, Exbivirumab, F19, Fanolesomab, Faralimomab, Farletuzumab, Fasinumab, FBTA05, Felvizumab, Fezakinumab, Ficlatuzumab, Figitumumab, Firivumab, Flanvotumab, Fletikumab, Fontolizumab, Foralumab, Foravirumab, Fresolimumab, Fulranumab, Futuximab, Galiximab, Ganitumab, Gantenerumab, Gavilimomab, Gemtuzumab ozogamicin, Gevokizumab, Girentuximab, Glembatumumab vedotin, Golimumab, Gomiliximab, Guselkumab, HGS-ETR2, hu3S193, huA33, Ibalizumab, Ibritumomab tiuxetan, Icrucumab, Idarucizumab, IGN101, IgN311, Igovomab, IIIA4, IM-2C6, IMAB362, Imalumab, IMC-A12, Imciromab, Imgatuzumab, Inclacumab, Indatuximab ravtansine, Indusatumab vedotin, Infliximab, Inolimomab, Inotuzumab ozogamicin, Intetumumab, Ipilimumab, Iratumumab, Isatuximab, Itolizumab, Ixekizumab, J591, KB004, Keliximab, KW-2871, Labetuzumab, Lambrolizumab, Lampalizumab, Lebrikizumab, Lemalesomab, Lenzilumab, Lerdelimumab, Lexatumumab, Libivirumab, Lifastuzumab vedotin, Ligelizumab, Lilotomab satetraxetan, Lintuzumab, Lirilumab, Lodelcizumab, Lokivetmab, Lorvotuzumab mertansine, Lucatumumab, Lulizumab pegol, Lumiliximab, Lumretuzumab, Mapatumumab, Margetuximab, Maslimomab, Matuzumab, Mavrilimumab, MED14736, Mepolizumab, Metelimumab, METMAB, Milatuzumab, Minretumomab, Mirvetuximab soravtansine, Mitumomab, MK-0646, MK-3475, MM-121, Mogamulizumab, MORAb-003, Morolimumab, Motavizumab, MOv18, Moxetumomab pasudotox, MPDL33280A, Muromonab-CD3, Nacolomab tafenatox, Namilumab, Naptumomab estafenatox, Narnatumab, Natalizumab, Nebacumab, Necitumumab, Nemolizumab, Nerelimomab, Nesvacumab, Nimotuzumab, Nivolumab, Nofetumomab merpentan, Obiltoxaximab, Obinutuzumab, Ocaratuzumab, Ocrelizumab, Odulimomab, Ofatumumab, Olaratumab, Olokizumab, Omalizumab, Onartuzumab, Ontuxizumab, Opicinumab, Oportuzumab monatox, Oregovomab, Orticumab, Otelixizumab, Otlertuzumab, Oxelumab, Ozanezumab, Ozoralizumab, Pagibaximab, Palivizumab, Panitumumab, Pankomab, Panobacumab, Parsatuzumab, Pascolizumab, Pasotuxizumab, Pateclizumab, Patritumab, Pembrolizumab, Pemtumomab, Perakizumab, Pertuzumab, Pexelizumab, Pidilizumab, Pinatuzumab vedotin, Pintumomab, Placulumab, Polatuzumab vedotin, Ponezumab, Priliximab, Pritoxaximab, Pritumumab, PRO 140, Quilizumab, R1507, Racotumomab, Radretumab, Rafivirumab, Ralpancizumab, Ramucirumab, Ranibizumab, Raxibacumab, Refanezumab, Regavirumab, Reslizumab, Rilotumumab, Rinucumab, Rituximab, Robatumumab, Roledumab, Romosozumab, Rontalizumab, Rovelizumab, Ruplizumab, Sacituzumab govitecan, Samalizumab, Sarilumab, Satumomab pendetide, SCH 900105, Secukinumab, Seribantumab, Setoxaximab, Sevirumab, SGN-CD19A, SGN-CD33A, Sibrotuzumab, Sifalimumab, Siltuximab, Simtuzumab, Siplizumab, Sirukumab, Sofituzumab vedotin, Solanezumab, Solitomab, Sonepcizumab, Sontuzumab, Stamulumab, Sulesomab, Suvizumab, Tabalumab, Tacatuzumab tetraxetan, Tadocizumab, Talizumab, Tanezumab, Taplitumomab paptox, Tarextumab, Tefibazumab, Telimomab aritox, Tenatumomab, Teneliximab, Teplizumab, Teprotumumab, Tesidolumab, Tetulomab, TGN1412, Ticilimumab/tremelimumab, Tigatuzumab, Tildrakizumab, TNX-650, Tocilizumab, Toralizumab, Tosatoxumab, Tositumomab, Tovetumab, Tralokinumab, Trastuzumab, TRBS07, Tregalizumab, Tremelimumab, Trevogrumab, Tucotuzumab celmoleukin, Tuvirumab, Ublituximab, Ulocuplumab, Urelumab, Urtoxazumab, Ustekinumab, Vandortuzumab vedotin, Vantictumab, Vanucizumab, Vapaliximab, Varlilumab, Vatelizumab, Vedolizumab, Veltuzumab, Vepalimomab, Vesencumab, Visilizumab, Volociximab, Vorsetuzumab mafodotin, Votumumab, Zalutumumab, Zanolimumab, Zatuximab, Ziralimumab and Zolimomab aritox.

[0281] In some cases, the target polypeptide is a CRISPR-Cas effector polypeptide. A suitable CRISPR-Cas effector polypeptide is a class 2 CRISPR/Cas endonuclease such as a type II, type V, or type VI CRISPR-Cas effector polypeptide. In some cases, a suitable RNA-guided endonuclease is a class 2 CRISPR/Cas endonuclease. In some cases, a suitable RNA-guided endonuclease is a class 2 type II CRISPR/Cas endonuclease (e.g., a Cas9 protein). In some cases, a CRISPR-Cas effector polypeptide is a class 2 type V CRISPR-Cas effector polypeptide (e.g., a Cpf1 protein, a C2c1 protein, or a C2c3 protein). In some cases, a suitable CRISPR-Cas effector polypeptide is a class 2 type VI CRISPR-Cas effector polypeptide (e.g., a C2c2 protein; also referred to as a “Cas13a” protein). Also suitable is a CasX protein. Also suitable is a CasY protein.

[0282] In some cases, the CRISPR/Cas effector polypeptide is a Type II CRISPR/Cas effector polypeptide. In some cases, the CRISPR/Cas effector polypeptide is a Cas9 polypeptide. The Cas9 protein is guided to a target site (e.g., stabilized at a target site) within a target nucleic acid sequence (e.g., a chromosomal sequence or an extrachromosomal sequence, e.g., an episomal sequence, a minicircle sequence, a mitochondrial sequence, a chloroplast sequence, etc.) by virtue of its association with the protein-binding segment of the Cas9 guide RNA. In some cases, a Cas9 polypeptide comprises an amino acid sequence having at least 50%, at least 60%, at least 70%, at least 80%, at least 90%, at least 95%, at least 98%, at least 99%, or more than 99%, amino acid sequence identity to the Streptococcus pyogenes Cas9 set forth in SEQ ID NO:753. In some cases, a Cas9 polypeptide comprises the amino acid sequence set forth in any one of SEQ ID NOs:5-816. In some cases, a Cas9 polypeptide comprises an amino acid sequence having at least 50%, at least 60%, at least 70%, at least 80%, at least 90%, at least 95%, at least 98%, at least 99%, or more than 99%, amino acid sequence identity to the amino acid sequence set forth in any one of SEQ ID NOs:5-816.

[0283] In some cases, the Cas9 polypeptide is a Staphylococcus aureus Cas9 (saCas9) polypeptide. In some cases, the saCas9 polypeptide comprises an amino acid sequence having at least 85%, at least 90%, at least 95%, at least 98%, at least 99%, or 100%, amino acid sequence identity to the saCas9 amino acid sequence set forth in SEQ ID NO:249.

[0284] In some cases, the Cas9 polypeptide is a Campylobacter jejuni Cas9 (CjCas9) polypeptide. CjCas9 recognizes the 5′-NNNVRYM-3′ as the protospacer-adjacent motif (PAM). The amino acid sequence of CjCas9 is set forth in SEQ ID NO:55. In some cases, a suitable Cas9 polypeptide comprises an amino acid sequence having at least 50%, at least 60%, at least 70%, at least 80%, at least 90%, at least 95%, at least 98%, at least 99%, or more than 99%, amino acid sequence identity to the CjCas9 amino acid sequence set forth in SEQ ID NO:55.

[0285] In some cases, a suitable Cas9 polypeptide is a high-fidelity (HF) Cas9 polypeptide. Kleinstiver et al. (2016) Nature 529:490. For example, amino acids N497, R661, Q695, and Q926 of a Streptococcus pyogenes Cas9 amino acid sequence (e.g., SEQ ID NO:5) are substituted, e.g., with alanine. For example, an HF Cas9 polypeptide can comprise an amino acid sequence having at least 90%, at least 95%, at least 98%, at least 99%, or 100%, amino acid sequence identity to a Streptococcus pyogenes Cas9 (e.g., SEQ ID NO:5), where amino acids N497, R661, Q695, and Q926 are substituted, e.g., with alanine. In some cases, a suitable Cas9 polypeptide exhibits altered PAM specificity. See, e.g., Kleinstiver et al. (2015) Nature 523:481.

[0286] In some cases, a suitable Cas9 polypeptide comprises an amino acid sequence having at least 90%, at least 95%, at least 98%, at least 99%, or 100%, amino acid sequence identity to the following Cas9-HF1 sequence:

(SEQ ID NO: 899)
DKKYSIGLAIGTNSVGWAVITDEYKVPSKKFKVLG
NTDRHSIKKNLIGALLFDSGETAEATRLKRTARRR
YTRRKNRICYLQEIFSNEMAKVDDSFFHRLEESFL
VEEDKKHERHPIFGNIVDEVAYHEKYPTIYHLRKK
LVDSTDKADLRLIYLALAHMIKFRGHFLIEGDLNP
DNSDVDKLFIQLVQTYNQLFEENPINASGVDAKAI
LSARLSKSRRLENLIAQLPGEKKNGLFGNLIALSL
GLTPNFKSNFDLAEDAKLQLSKDTYDDDLDNLLAQ
IGDQYADLFLAAKNLSDAILLSDILRVNTEITKAP
LSASMIKRYDEHHQDLTLLKALVRQQLPEKYKEIF
FDQSKNGYAGYIDGGASQEEFYKFIKPILEKMDGT
EELLVKLNREDLLRKQRTFDNGSIPHQIHLGELHA
ILRRQEDFYPFLKDNREKIEKILTFRIPYYVGPLA
RGNSRFAWMTRKSEETITPWNFEEVVDKGASAQSF
IERMTAFDKNLPNEKVLPKHSLLYEYFTVYNELTK
VKYVTEGMRKPAFLSGEQKKAIVDLLFKTNRKVTV
KQLKEDYFKKIECFDSVEISGVEDRFNASLGTYHD
LLKIIKDKDFLDNEENEDILEDIVLTLTLFEDREM
IEERLKTYAHLFDDKVMKQLKRRRYTGWGALSRKL
INGIRDKQSGKTILDFLKSDGFANRNFMALIHDDS
LTFKEDIQKAQVSGQGDSLHEHIANLAGSPAIKKG
ILQTVKVVDELVKVMGRHKPENIVIEMARENQTTQ
KGQKNSRERMKRIEEGIKELGSQILKEHPVENTQL
QNEKLYLYYLQNGRDMYVDQELDINRLSDYDVDHI
VPQSFLKDDSIDNKVLTRSDKNRGKSDNVPSEEVV
KKMKNYWRQLLNAKLITQRKFDNLTKAERGGLSEL
DKAGFIKRQLVETRAITKHVAQILDSRMNTKYDEN
DKLIREVKVITLKSKLVSDFRKDFQFYKVREINNY
HHAHDAYLNAVVGTALIKKYPKLESEFVYGDYKVY
DVRKMIAKSEQEIGKATAKYFFYSNIMNFFKTEIT
LANGEIRKRPLIETNGETGEIVWDKGRDFATVRKV
LSMPQVNIVKKTEVQTGGFSKESILPKRNSDKLIA
RKKDWDPKKYGGFDSPTVAYSVLVVAKVEKGKSKK
LKSVKELLGITIMERSSFEKNPIDFLEAKGYKEVK
KDLIIKLPKYSLFELENGRKRMLASAGELQKGNEL
ALPSKYVNFLYLASHYEKLKGSPEDNEQKQLFVEQ
HKHYLDEIIEQISEFSKRVILADANLDKVLSAYNK
HRDKPIREQAENIIHLFTLTNLGAPAAFKYFDTTI
DRKRYTSTKEVLDATLIHQSITGLYETRIDLSQLG
GD.

[0287] In some cases, a suitable CRISPR/Cas effector polypeptide is a type V CRISPR/Cas effector polypeptide. In some cases, a type V CRISPR/Cas effector polypeptide is a Cpf1 protein. In some cases, a Cpf1 protein comprises an amino acid sequence having at least 30%, at least 35%, at least 40%, at least 45%, at least 50%, at least 55%, at least 60%, at least 65%, at least 70%, at least 75%, at least 80%, at least 85%, at least 90%, at least 95%, at least 90%, or 100%, amino acid sequence identity to the Cpf1 amino acid sequence set forth in any one of SEQ ID NOs:818-822.

[0288] In some cases, a suitable CRISPR/Cas effector polypeptide is a CasX or a CasY polypeptide. CasX and CasY polypeptides are described in Burstein et al. (2017) Nature 542:237.

[0289] In some cases, a suitable CRISPR/Cas effector polypeptide is a fusion protein comprising a CRISPR/Cas effector polypeptide that is fused to a heterologous polypeptide (also referred to as a “fusion partner”). In some cases, a CRISPR/Cas effector polypeptide is fused to an amino acid sequence (a fusion partner) that provides for subcellular localization, i.e., the fusion partner is a subcellular localization sequence (e.g., one or more nuclear localization signals (NLSs) for targeting to the nucleus, two or more NLSs, three or more NLSs, etc.).

[0290] A nucleic acid that binds to a class 2 CRISPR/Cas effector polypeptide (e.g., a Cas9 protein; a type V or type VI CRISPR/Cas protein; a Cpf1 protein; etc.) and targets the complex to a specific location within a target nucleic acid is referred to herein as a “guide RNA” or “CRISPR/Cas guide nucleic acid” or “CRISPR/Cas guide RNA.” A guide RNA provides target specificity to the complex (the RNP complex) by including a targeting segment, which includes a guide sequence (also referred to herein as a targeting sequence), which is a nucleotide sequence that is complementary to a sequence of a target nucleic acid.

[0291] In some cases, a guide RNA includes two separate nucleic acid molecules: an “activator” and a “targeter” and is referred to herein as a “dual guide RNA”, a “double-molecule guide RNA”, a “two-molecule guide RNA”, or a “dgRNA.” In some cases, the guide RNA is one molecule (e.g., for some class 2 CRISPR/Cas proteins, the corresponding guide RNA is a single molecule; and in some cases, an activator and targeter are covalently linked to one another, e.g., via intervening nucleotides), and the guide RNA is referred to as a “single guide RNA”, a “single-molecule guide RNA,” a “one-molecule guide RNA”, or simply “sgRNA.”

### Class 2 CRISPR/Cas Effector Polypeptides

[0292] In class 2 CRISPR systems, the functions of the effector complex (e.g., the cleavage of target DNA) are carried out by a single endonuclease (e.g., see Zetsche et al., Cell. 2015 Oct. 22; 163(3):759-71; Makarova et al., Nat Rev Microbiol. 2015 Nov.; 13(11):722-36; Shmakov et al., Mol Cell. 2015 Nov. 5; 60(3):385-97); and Shmakov et al. (2017) Nature Reviews Microbiology 15:169. As such, the term “class 2 CRISPR/Cas protein” is used herein to encompass the CRISPR/Cas effector polypeptide (e.g., the target nucleic acid cleaving protein) from class 2 CRISPR systems. Thus, the term “class 2 CRISPR/Cas effector polypeptide” as used herein encompasses type II CRISPR/Cas effector polypeptides (e.g., Cas9); type V-A CRISPR/Cas effector polypeptides (e.g., Cpf1 (also referred to a “Cas12a”)); type V-B CRISPR/Cas effector polypeptides (e.g., C2cl (also referred to as “Cas12b”)); type V-C CRISPR/Cas effector polypeptides (e.g., C2c3 (also referred to as “Cas12c”)); type V-U1 CRISPR/Cas effector polypeptides (e.g., C2c4); type V-U2 CRISPR/Cas effector polypeptides (e.g., C2c8); type V-U5 CRISPR/Cas effector polypeptides (e.g., C2c5); type V-U4 CRISPR/Cas proteins (e.g., C2c9); type V-U3 CRISPR/Cas effector polypeptides (e.g., C2c10); type VI-A CRISPR/Cas effector polypeptides (e.g., C2c2 (also known as “Cas13a”)); type VI-B CRISPR/Cas effector polypeptides (e.g., Cas13b (also known as C2c4)); and type VI-C CRISPR/Cas effector polypeptides (e.g., Cas13c (also known as C2c7)). To date, class 2 CRISPR/Cas effector polypeptides encompass type II, type V, and type VI CRISPR/Cas effector polypeptides, but the term is also meant to encompass any class 2 CRISPR/Cas effector polypeptide suitable for binding to a corresponding guide RNA and forming an RNP complex.

### Type II CRISPR/Cas Endonucleases (e.g., Cas 9)

[0293] In natural Type II CRISPR/Cas systems, Cas9 functions as an RNA-guided endonuclease that uses a dual-guide RNA having a crRNA and trans-activating crRNA (tracrRNA) for target recognition and cleavage by a mechanism involving two nuclease active sites in Cas9 that together generate double-stranded DNA breaks (DSBs), or can individually generate single-stranded DNA breaks (SSBs). The Type II CRISPR endonuclease Cas9 and engineered dual-(dgRNA) or single guide RNA (sgRNA) form a ribonucleoprotein (RNP) complex that can be targeted to a desired DNA sequence. Guided by a dual-RNA complex or a chimeric single-guide RNA, Cas9 generates site-specific DSBs or SSBs within double-stranded DNA (dsDNA) target nucleic acids, which are repaired either by non-homologous end joining (NHEJ) or homology-directed recombination (HDR).

[0294] A type II CRISPR/Cas effector polypeptide is a type of class 2 CRISPR/Cas endonuclease. In some cases, the type II CRISPR/Cas endonuclease is a Cas9 protein. A Cas9 protein forms a complex with a Cas9 guide RNA. The guide RNA provides target specificity to a Cas9-guide RNA complex by having a nucleotide sequence (a guide sequence) that is complementary to a sequence (the target site) of a target nucleic acid (as described elsewhere herein). The Cas9 protein of the complex provides the site-specific activity. In other words, the Cas9 protein is guided to a target site (e.g., stabilized at a target site) within a target nucleic acid sequence (e.g. a chromosomal sequence or an extrachromosomal sequence, e.g., an episomal sequence, a minicircle sequence, a mitochondrial sequence, a chloroplast sequence, etc.) by virtue of its association with the protein-binding segment of the Cas9 guide RNA.

[0295] A Cas9 protein can bind and/or modify (e.g., cleave, nick, methylate, demethylate, etc.) a target nucleic acid and/or a polypeptide associated with target nucleic acid (e.g., methylation or acetylation of a histone tail)(e.g., when the Cas9 protein includes a fusion partner with an activity). In some cases, the Cas9 protein is a naturally-occurring protein (e.g., naturally occurs in bacterial and/or archaeal cells). In other cases, the Cas9 protein is not a naturally-occurring polypeptide (e.g., the Cas9 protein is a variant Cas9 protein, a chimeric protein, and the like).

[0296] Examples of suitable Cas9 proteins include, but are not limited to, those set forth in SEQ ID NOs: 5-816. Naturally occurring Cas9 proteins bind a Cas9 guide RNA, are thereby directed to a specific sequence within a target nucleic acid (a target site), and cleave the target nucleic acid (e.g., cleave dsDNA to generate a double strand break, cleave ssDNA, cleave ssRNA, etc.). A chimeric Cas9 protein is a fusion protein comprising a Cas9 polypeptide that is fused to a heterologous protein (referred to as a fusion partner), where the heterologous protein provides an activity (e.g., one that is not provided by the Cas9 protein). The fusion partner can provide an activity, e.g., enzymatic activity (e.g., nuclease activity, activity for DNA and/or RNA methylation, activity for DNA and/or RNA cleavage, activity for histone acetylation, activity for histone methylation, activity for RNA modification, activity for RNA-binding, activity for RNA splicing etc.). In some cases, a portion of the Cas9 protein (e.g., the RuvC domain and/or the HNH domain) exhibits reduced nuclease activity relative to the corresponding portion of a wild type Cas9 protein (e.g., in some cases the Cas9 protein is a nickase). In some cases, the Cas9 protein is enzymatically inactive, or has reduced enzymatic activity relative to a wild-type Cas9 protein (e.g., relative to Streptococcus pyogenes Cas9).

[0297] In some cases, a fusion protein comprises: a) a catalytically inactive Cas9 protein (or other catalytically inactive CRISPR effector polypeptide); and b) a catalytically active endonuclease. For example, in some cases, the catalytically active endonuclease is a FokI polypeptide. As one non-limiting example, in some cases, a fusion protein comprises: a) a catalytically inactive Cas9 protein (or other catalytically inactive CRISPR effector polypeptide); and b) is a FokI nuclease comprising an amino acid sequence having at least at least 85%, at least 90%, at least 95%, at least 98%, at least 99%, or 100%, amino acid sequence identity to the FokI amino acid sequence provided below; where the FokI nuclease has a length of from about 195 amino acids to about 200 amino acids.

### FokI Nuclease Amino Acid Sequence:

(SEQ ID NO: 900)
QLVKSELEEKKSELRHKLKYVPHEYIELIEIARNS
TQDRILEMKVMEFFMKVYGYRGKHLGGSRKPDGAI
YTVGSPIDYGVIVDTKAYSGGYNLPIGQADEMQRY
VEENQTRNKHINPNEWWKVYPSSVTEFKFLFVSGH
FKGNYKAQLTRLNHITNCNGAVLSVEELLIGGEMI
KAGTLTLEEVRRKFNNGEINF.

[0298] Assays to determine whether given protein interacts with a Cas9 guide RNA can be any convenient binding assay that tests for binding between a protein and a nucleic acid. Suitable binding assays (e.g., gel shift assays) will be known to one of ordinary skill in the art (e.g., assays that include adding a Cas9 guide RNA and a protein to a target nucleic acid).

[0299] Assays to determine whether a protein has an activity (e.g., to determine if the protein has nuclease activity that cleaves a target nucleic acid and/or some heterologous activity) can be any convenient assay (e.g., any convenient nucleic acid cleavage assay that tests for nucleic acid cleavage). Suitable assays (e.g., cleavage assays) will be known to one of ordinary skill in the art and can include adding a Cas9 guide RNA and a protein to a target nucleic acid.

[0300] In some cases, a suitable Cas9 protein comprises an amino acid sequence having 60% or more, 70% or more, 75% or more, 80% or more, 85% or more, 90% or more, 95% or more, 99% or more or 100% amino acid sequence identity to amino acids 7-166 or 731-1003 of the Cas9 amino acid sequence set forth in SEQ ID NO: 5, or to the corresponding portions in any of the amino acid sequences set forth as SEQ ID NOs: 6-816.

[0301] Examples of various Cas9 proteins (and Cas9 domain structure) and Cas9 guide RNAs (as well as information regarding requirements related to protospacer adjacent motif (PAM) sequences present in targeted nucleic acids) can be found in the art, for example, see Jinek et al., Science. 2012 Aug. 17; 337(6096):816-21; Chylinski et al., RNA Biol. 2013 May; 10(5):726-37; Ma et al., Biomed Res Int. 2013; 2013:270805; Hou et al., Proc Natl Acad Sci USA. 2013 Sep. 24; 110(39):15644-9; Jinek et al., Elife. 2013; 2:e00471; Pattanayak et al., Nat Biotechnol. 2013 Sep.; 31(9):839-43; Qi et al., Cell. 2013 Feb. 28; 152(5):1173-83; Wang et al., Cell. 2013 May 9; 153(4):910-8; Auer et al., Genome Res. 2013 Oct. 31; Chen et al., Nucleic Acids Res. 2013 Nov. 1; 41(20):e19; Cheng et al., Cell Res. 2013 Oct.; 23(10):1163-71; Cho et al., Genetics. 2013 November; 195(3):1177-80; DiCarlo et al., Nucleic Acids Res. 2013 April; 41(7):4336-43; Dickinson et al., Nat Methods. 2013 Oct.; 10(10):1028-34; Ebina et al., Sci Rep. 2013; 3:2510; Fujii et al., Nucleic Acids Res. 2013 Nov. 1; 41(20):e187; Hu et al., Cell Res. 2013 Nov.; 23(11):1322-5; Jiang et al., Nucleic Acids Res. 2013 Nov. 1; 41(20):e188; Larson et al., Nat Protoc. 2013 Nov.; 8(11):2180-96; Mali et al., Nat Methods. 2013 Oct.; 10(10):957-63; Nakayama et al., Genesis. 2013 December; 51(12):835-43; Ran et al., Nat Protoc. 2013 Nov.; 8(11):2281-308; Ran et al., Cell. 2013 Sep. 12; 154(6):1380-9; Upadhyay et al., G3 (Bethesda). 2013 Dec. 9; 3(12):2233-8; Walsh et al., Proc Natl Acad Sci USA. 2013 Sep. 24; 110(39):15514-5; Xie et al., Mol Plant. 2013 Oct. 9; Yang et al., Cell. 2013 Sep. 12; 154(6):1370-9; Briner et al., Mol Cell. 2014 Oct. 23; 56(2):333-9; Shmakov et al., Nat Rev Microbiol. 2017 Mar.; 15(3):169-182; and U.S. patents and patent applications: U.S. Pat. Nos. 8,906,616; 8,895,308; 8,889,418; 8,889,356; 8,871,445; 8,865,406; 8,795,965; 8,771,945; 8,697,359; 20140068797; 20140170753; 20140179006; 20140179770; 20140186843; 20140186919; 20140186958; 20140189896; 20140227787; 20140234972; 20140242664; 20140242699; 20140242700; 20140242702; 20140248702; 20140256046; 20140273037; 20140273226; 20140273230; 20140273231; 20140273232; 20140273233; 20140273234; 20140273235; 20140287938; 20140295556; 20140295557; 20140298547; 20140304853; 20140309487; 20140310828; 20140310830; 20140315985; 20140335063; 20140335620; 20140342456; 20140342457; 20140342458; 20140349400; 20140349405; 20140356867; 20140356956; 20140356958; 20140356959; 20140357523; 20140357530; 20140364333; and 20140377868; each of which is hereby incorporated by reference in its entirety.

Variant Cas9 Proteins—Nickases and dCas9

[0302] In some cases, a Cas9 protein is a variant Cas9 protein. A variant Cas9 protein has an amino acid sequence that is different by at least one amino acid (e.g., has a deletion, insertion, substitution, fusion) when compared to the amino acid sequence of a corresponding wild type Cas9 protein. In some instances, the variant Cas9 protein has an amino acid change (e.g., deletion, insertion, or substitution) that reduces the nuclease activity of the Cas9 protein. For example, in some instances, the variant Cas9 protein has 50% or less, 40% or less, 30% or less, 20% or less, 10% or less, 5% or less, or 1% or less of the nuclease activity of the corresponding wild-type Cas9 protein. In some cases, the variant Cas9 protein has no substantial nuclease activity. When a Cas9 protein is a variant Cas9 protein that has no substantial nuclease activity, it can be referred to as a nuclease defective Cas9 protein or “dCas9” for “dead” Cas9. A protein (e.g., a class 2 CRISPR/Cas protein, e.g., a Cas9 protein) that cleaves one strand but not the other of a double stranded target nucleic acid is referred to herein as a “nickase” (e.g., a “nickase Cas9”).

[0303] In some cases, a variant Cas9 protein can cleave the complementary strand (sometimes referred to in the art as the target strand) of a target nucleic acid but has reduced ability to cleave the non-complementary strand (sometimes referred to in the art as the non-target strand) of a target nucleic acid. For example, the variant Cas9 protein can have a mutation (amino acid substitution) that reduces the function of the RuvC domain. Thus, the Cas9 protein can be a nickase that cleaves the complementary strand, but does not cleave the non-complementary strand. As a non-limiting example, in some embodiments, a variant Cas9 protein has a mutation at an amino acid position corresponding to residue D10 (e.g., D10A, aspartate to alanine) of SEQ ID NO: 5 (or the corresponding position of any of the proteins set forth in SEQ ID NOs: 6-261 and 264-816) and can therefore cleave the complementary strand of a double stranded target nucleic acid but has reduced ability to cleave the non-complementary strand of a double stranded target nucleic acid (thus resulting in a single strand break (SSB) instead of a double strand break (DSB) when the variant Cas9 protein cleaves a double stranded target nucleic acid) (see, for example, Jinek et al., Science. 2012 Aug. 17; 337(6096):816-21). See, e.g., SEQ ID NO: 262.

[0304] In some cases, a variant Cas9 protein can cleave the non-complementary strand of a target nucleic acid but has reduced ability to cleave the complementary strand of the target nucleic acid. For example, the variant Cas9 protein can have a mutation (amino acid substitution) that reduces the function of the HNH domain. Thus, the Cas9 protein can be a nickase that cleaves the non-complementary strand, but does not cleave the complementary strand. As a non-limiting example, in some embodiments, the variant Cas9 protein has a mutation at an amino acid position corresponding to residue H840 (e.g., an H840A mutation, histidine to alanine) of SEQ ID NO: 5 (or the corresponding position of any of the proteins set forth as SEQ ID NOs: 6-261 and 264-816) and can therefore cleave the non-complementary strand of the target nucleic acid but has reduced ability to cleave (e.g., does not cleave) the complementary strand of the target nucleic acid. Such a Cas9 protein has a reduced ability to cleave a target nucleic acid (e.g., a single stranded target nucleic acid) but retains the ability to bind a target nucleic acid (e.g., a single stranded target nucleic acid). See, e.g., SEQ ID NO: 263.

[0305] In some cases, a variant Cas9 protein has a reduced ability to cleave both the complementary and the non-complementary strands of a double stranded target nucleic acid. As a non-limiting example, in some cases, the variant Cas9 protein harbors mutations at amino acid positions corresponding to residues D10 and H840 (e.g., D10A and H840A) of SEQ ID NO: 5 (or the corresponding residues of any of the proteins set forth as SEQ ID NOs: 6-261 and 264-816) such that the polypeptide has a reduced ability to cleave (e.g., does not cleave) both the complementary and the non-complementary strands of a target nucleic acid. Such a Cas9 protein has a reduced ability to cleave a target nucleic acid (e.g., a single stranded or double stranded target nucleic acid) but retains the ability to bind a target nucleic acid. A Cas9 protein that cannot cleave target nucleic acid (e.g., due to one or more mutations, e.g., in the catalytic domains of the RuvC and HNH domains) is referred to as a “dead” Cas9 or simply “dCas9.” See, e.g., SEQ ID NO: 264.

### Type V and Type VI CRISPR/Cas Endonucleases

[0306] In some cases, a suitable CRISPR/Cas effector polypeptide is a type V or type VI CRISPR/Cas endonuclease (i.e., the CRISPR/Cas effector polypeptide is a type V or type VI CRISPR/Cas endonuclease) (e.g., Cpf1, C2cl, C2c2, C2c3). Type V and type VI CRISPR/Cas endonucleases are a type of class 2 CRISPR/Cas endonuclease. Examples of type V CRISPR/Cas endonucleases include but are not limited to: Cpf1, C2c1, and C2c3. An example of a type VI CRISPR/Cas effector polypeptide is C2c2. In some cases, a suitable CRISPR/Cas effector polypeptide is a type V CRISPR/Cas endonuclease (e.g., Cpf1, C2c1, C2c3). In some cases, a Type V CRISPR/Cas effector polypeptide is a Cpf1 protein. In some cases, a suitable CRISPR/Cas effector polypeptide is a type VI CRISPR/Cas endonuclease (e.g., Cas13a).

[0307] Like type II CRISPR/Cas endonucleases, type V and VI CRISPR/Cas endonucleases form a complex with a corresponding guide RNA. The guide RNA provides target specificity to an endonuclease-guide RNA RNP complex by having a nucleotide sequence (a guide sequence) that is complementary to a sequence (the target site) of a target nucleic acid (as described elsewhere herein). The endonuclease of the complex provides the site-specific activity. In other words, the endonuclease is guided to a target site (e.g., stabilized at a target site) within a target nucleic acid sequence (e.g. a chromosomal sequence or an extrachromosomal sequence, e.g., an episomal sequence, a minicircle sequence, a mitochondrial sequence, a chloroplast sequence, etc.) by virtue of its association with the protein-binding segment of the guide RNA.

[0308] Examples and guidance related to type V and type VI CRISPR/Cas proteins (e.g., Cpf1, C2c1, C2c2, and C2c3 guide RNAs) can be found in the art, for example, see Zetsche et al., Cell. 2015 Oct. 22; 163(3):759-71; Makarova et al., Nat Rev Microbiol. 2015 Nov.; 13(11):722-36; Shmakov et al., Mol Cell. 2015 Nov. 5; 60(3):385-97; and Shmakov et al. (2017) Nature Reviews Microbiology 15:169.

[0309] In some cases, the Type V or type VI CRISPR/Cas endonuclease (e.g., Cpf1, C2cl, C2c2, C2c3) is enzymatically active, e.g., the Type V or type VI CRISPR/Cas polypeptide, when bound to a guide RNA, cleaves a target nucleic acid. In some cases, the Type V or type VI CRISPR/Cas endonuclease (e.g., Cpf1, C2c1, C2c2, C2c3) exhibits reduced enzymatic activity relative to a corresponding wild-type a Type V or type VI CRISPR/Cas endonuclease (e.g., Cpf1, C2c1, C2c2, C2c3), and retains DNA binding activity.

[0310] In some cases, a type V CRISPR/Cas endonuclease is a Cpf1 protein. In some cases, a Cpf1 protein comprises an amino acid sequence having at least 30%, at least 35%, at least 40%, at least 45%, at least 50%, at least 55%, at least 60%, at least 65%, at least 70%, at least 75%, at least 80%, at least 85%, at least 90%, at least 95%, at least 90%, or 100%, amino acid sequence identity to the Cpf1 amino acid sequence set forth in any of SEQ ID NOs: 818-822. In some cases, a Cpf1 protein comprises an amino acid sequence having at least 30%, at least 35%, at least 40%, at least 45%, at least 50%, at least 55%, at least 60%, at least 65%, at least 70%, at least 75%, at least 80%, at least 85%, at least 90%, at least 95%, at least 90%, or 100%, amino acid sequence identity to a contiguous stretch of from 100 amino acids to 200 amino acids (aa), from 200 aa to 400 aa, from 400 aa to 600 aa, from 600 aa to 800 aa, from 800 aa to 1000 aa, from 1000 aa to 1100 aa, from 1100 aa to 1200 aa, or from 1200 aa to 1300 aa, of the Cpf1 amino acid sequence set forth in any of SEQ ID NOs:818-822.

[0311] In some cases, a Cpf1 protein comprises an amino acid sequence having at least 30%, at least 35%, at least 40%, at least 45%, at least 50%, at least 55%, at least 60%, at least 65%, at least 70%, at least 75%, at least 80%, at least 85%, at least 90%, at least 95%, at least 90%, or 100%, amino acid sequence identity to the RuvCI domain of the Cpf1 amino acid sequence set forth in any of SEQ ID NOs: 818-822. In some cases, a Cpf1 protein comprises an amino acid sequence having at least 30%, at least 35%, at least 40%, at least 45%, at least 50%, at least 55%, at least 60%, at least 65%, at least 70%, at least 75%, at least 80%, at least 85%, at least 90%, at least 95%, at least 90%, or 100%, amino acid sequence identity to the RuvCII domain of the Cpf1 amino acid sequence set forth in any of SEQ ID NOs: 818-822. In some cases, a Cpf1 protein comprises an amino acid sequence having at least 30%, at least 35%, at least 40%, at least 45%, at least 50%, at least 55%, at least 60%, at least 65%, at least 70%, at least 75%, at least 80%, at least 85%, at least 90%, at least 95%, at least 90%, or 100%, amino acid sequence identity to the RuvCIII domain of the Cpf1 amino acid sequence set forth in any of SEQ ID NOs: 818-822. In some cases, a Cpf1 protein comprises an amino acid sequence having at least 30%, at least 35%, at least 40%, at least 45%, at least 50%, at least 55%, at least 60%, at least 65%, at least 70%, at least 75%, at least 80%, at least 85%, at least 90%, at least 95%, at least 90%, or 100%, amino acid sequence identity to the RuvCI, RuvCII, and RuvCIII domains of the Cpf1 amino acid sequence set forth in any of SEQ ID NOs: 818-822.

[0312] In some cases, the Cpf1 protein exhibits reduced enzymatic activity relative to a wild-type Cpf1 protein (e.g., relative to a Cpf1 protein comprising the amino acid sequence set forth in any of SEQ ID NOs: 818-822), and retains DNA binding activity. In some cases, a Cpf1 protein comprises an amino acid sequence having at least 30%, at least 35%, at least 40%, at least 45%, at least 50%, at least 55%, at least 60%, at least 65%, at least 70%, at least 75%, at least 80%, at least 85%, at least 90%, at least 95%, at least 90%, or 100%, amino acid sequence identity to the Cpf1 amino acid sequence set forth in any of SEQ ID NOs: 818-822; and comprises an amino acid substitution (e.g., a D→A substitution) at an amino acid residue corresponding to amino acid 917 of the Cpf1 amino acid sequence set forth in SEQ ID NO: 818. In some cases, a Cpf1 protein comprises an amino acid sequence having at least 30%, at least 35%, at least 40%, at least 45%, at least 50%, at least 55%, at least 60%, at least 65%, at least 70%, at least 75%, at least 80%, at least 85%, at least 90%, at least 95%, at least 90%, or 100%, amino acid sequence identity to the Cpf1 amino acid sequence set forth in any of SEQ ID NOs: 818-822; and comprises an amino acid substitution (e.g., an E→A substitution) at an amino acid residue corresponding to amino acid 1006 of the Cpf1 amino acid sequence set forth in SEQ ID NO: 818. In some cases, a Cpf1 protein comprises an amino acid sequence having at least 30%, at least 35%, at least 40%, at least 45%, at least 50%, at least 55%, at least 60%, at least 65%, at least 70%, at least 75%, at least 80%, at least 85%, at least 90%, at least 95%, at least 90%, or 100%, amino acid sequence identity to the Cpf1 amino acid sequence set forth in any of SEQ ID NOs: 818-822; and comprises an amino acid substitution (e.g., a D--A substitution) at an amino acid residue corresponding to amino acid 1255 of the Cpf1 amino acid sequence set forth in SEQ ID NO: 818.

[0313] In some cases, a suitable Cpf1 protein comprises an amino acid sequence having at least 30%, at least 35%, at least 40%, at least 45%, at least 50%, at least 55%, at least 60%, at least 65%, at least 70%, at least 75%, at least 80%, at least 85%, at least 90%, at least 95%, at least 90%, or 100%, amino acid sequence identity to the Cpf1 amino acid sequence set forth in any of SEQ ID NOs: 818-822.

[0314] In some cases, a type V CRISPR/Cas endonuclease is a C2cl protein (examples include those set forth as SEQ ID NOs: 823-830). In some cases, a C2cl protein comprises an amino acid sequence having at least 30%, at least 35%, at least 40%, at least 45%, at least 50%, at least 55%, at least 60%, at least 65%, at least 70%, at least 75%, at least 80%, at least 85%, at least 90%, at least 95%, at least 90%, or 100%, amino acid sequence identity to the C2cl amino acid sequence set forth in any of SEQ ID NOs: 823-830. In some cases, a C2cl protein comprises an amino acid sequence having at least 30%, at least 35%, at least 40%, at least 45%, at least 50%, at least 55%, at least 60%, at least 65%, at least 70%, at least 75%, at least 80%, at least 85%, at least 90%, at least 95%, at least 90%, or 100%, amino acid sequence identity to a contiguous stretch of from 100 amino acids to 200 amino acids (aa), from 200 aa to 400 aa, from 400 aa to 600 aa, from 600 aa to 800 aa, from 800 aa to 1000 aa, from 1000 aa to 1100 aa, from 1100 aa to 1200 aa, or from 1200 aa to 1300 aa, of the C2cl amino acid sequence set forth in any of SEQ ID NOs: 823-830.

[0315] In some cases, a C2cl protein comprises an amino acid sequence having at least 30%, at least 35%, at least 40%, at least 45%, at least 50%, at least 55%, at least 60%, at least 65%, at least 70%, at least 75%, at least 80%, at least 85%, at least 90%, at least 95%, at least 90%, or 100%, amino acid sequence identity to the RuvCI domain of the C2cl amino acid sequences set forth in any of SEQ ID NOs: 823-830). In some cases, a C2cl protein comprises an amino acid sequence having at least 30%, at least 35%, at least 40%, at least 45%, at least 50%, at least 55%, at least 60%, at least 65%, at least 70%, at least 75%, at least 80%, at least 85%, at least 90%, at least 95%, at least 90%, or 100%, amino acid sequence identity to the RuvCII domain of the C2cl amino acid sequence set forth in any of SEQ ID NOs: 823-830. In some cases, a C2cl protein comprises an amino acid sequence having at least 30%, at least 35%, at least 40%, at least 45%, at least 50%, at least 55%, at least 60%, at least 65%, at least 70%, at least 75%, at least 80%, at least 85%, at least 90%, at least 95%, at least 90%, or 100%, amino acid sequence identity to the RuvCIII domain of the C2cl amino acid sequence set forth in any of SEQ ID NOs: 823-830. In some cases, a C2c1 protein comprises an amino acid sequence having at least 30%, at least 35%, at least 40%, at least 45%, at least 50%, at least 55%, at least 60%, at least 65%, at least 70%, at least 75%, at least 80%, at least 85%, at least 90%, at least 95%, at least 90%, or 100%, amino acid sequence identity to the RuvCI, RuvCII, and RuvCIII domains of the C2c1 amino acid sequence set forth in any of SEQ ID NOs: 823-830.

[0316] In some cases, a type V CRISPR/Cas endonuclease is a C2c3 protein (examples include those set forth as SEQ ID NOs: 831-834). In some cases, a C2c3 protein comprises an amino acid sequence having at least 30%, at least 35%, at least 40%, at least 45%, at least 50%, at least 55%, at least 60%, at least 65%, at least 70%, at least 75%, at least 80%, at least 85%, at least 90%, at least 95%, at least 90%, or 100%, amino acid sequence identity to the C2c3 amino acid sequence set forth in any of SEQ ID NOs: 831-834. In some cases, a C2c3 protein comprises an amino acid sequence having at least 30%, at least 35%, at least 40%, at least 45%, at least 50%, at least 55%, at least 60%, at least 65%, at least 70%, at least 75%, at least 80%, at least 85%, at least 90%, at least 95%, at least 90%, or 100%, amino acid sequence identity to a contiguous stretch of from 100 amino acids to 200 amino acids (aa), from 200 aa to 400 aa, from 400 aa to 600 aa, from 600 aa to 800 aa, from 800 aa to 1000 aa, from 1000 aa to 1100 aa, from 1100 aa to 1200 aa, or from 1200 aa to 1300 aa, of the C2c3 amino acid sequence set forth in any of SEQ ID NOs: 831-834.

[0317] In some cases, a C2c3 protein comprises an amino acid sequence having at least 30%, at least 35%, at least 40%, at least 45%, at least 50%, at least 55%, at least 60%, at least 65%, at least 70%, at least 75%, at least 80%, at least 85%, at least 90%, at least 95%, at least 90%, or 100%, amino acid sequence identity to the RuvCI domain of the C2c3 amino acid sequence set forth in any of SEQ ID NOs: 831-834. In some cases, a C2c3 protein comprises an amino acid sequence having at least 30%, at least 35%, at least 40%, at least 45%, at least 50%, at least 55%, at least 60%, at least 65%, at least 70%, at least 75%, at least 80%, at least 85%, at least 90%, at least 95%, at least 90%, or 100%, amino acid sequence identity to the RuvCII domain of the C2c3 amino acid sequence set forth in any of SEQ ID NOs: 831-834. In some cases, a C2c3 protein comprises an amino acid sequence having at least 30%, at least 35%, at least 40%, at least 45%, at least 50%, at least 55%, at least 60%, at least 65%, at least 70%, at least 75%, at least 80%, at least 85%, at least 90%, at least 95%, at least 90%, or 100%, amino acid sequence identity to the RuvCIII domain of the C2c3 amino acid sequence set forth in any of SEQ ID NOs: 831-834. In some cases, a C2c3 protein comprises an amino acid sequence having at least 30%, at least 35%, at least 40%, at least 45%, at least 50%, at least 55%, at least 60%, at least 65%, at least 70%, at least 75%, at least 80%, at least 85%, at least 90%, at least 95%, at least 90%, or 100%, amino acid sequence identity to the RuvCI, RuvCII, and RuvCIII domains of the C2c3 amino acid sequence set forth in any of SEQ ID NOs: 831-834.

[0318] In some cases, the C2c3 protein exhibits reduced enzymatic activity relative to a wild-type C2c3 protein (e.g., relative to a C2c3 protein comprising the amino acid sequence set forth in any of SEQ ID NOs: 831-834), and retains DNA binding activity. In some cases, a suitable C2c3 protein comprises an amino acid sequence having at least 30%, at least 35%, at least 40%, at least 45%, at least 50%, at least 55%, at least 60%, at least 65%, at least 70%, at least 75%, at least 80%, at least 85%, at least 90%, at least 95%, at least 90%, or 100%, amino acid sequence identity to the C2c3 amino acid sequence set forth in any of SEQ ID NOs: 831-834.

[0319] In some cases, a type VI CRISPR/Cas endonuclease is a C2c2 protein (examples include those set forth as SEQ ID NOs: 835-845). In some cases, a C2c2 protein comprises an amino acid sequence having at least 30%, at least 35%, at least 40%, at least 45%, at least 50%, at least 55%, at least 60%, at least 65%, at least 70%, at least 75%, at least 80%, at least 85%, at least 90%, at least 95%, at least 90%, or 100%, amino acid sequence identity to the C2c2 amino acid sequence set forth in any of SEQ ID NOs: 835-845. In some cases, a C2c2 protein comprises an amino acid sequence having at least 30%, at least 35%, at least 40%, at least 45%, at least 50%, at least 55%, at least 60%, at least 65%, at least 70%, at least 75%, at least 80%, at least 85%, at least 90%, at least 95%, at least 90%, or 100%, amino acid sequence identity to a contiguous stretch of from 100 amino acids to 200 amino acids (aa), from 200 aa to 400 aa, from 400 aa to 600 aa, from 600 aa to 800 aa, from 800 aa to 1000 aa, from 1000 aa to 1100 aa, from 1100 aa to 1200 aa, or from 1200 aa to 1300 aa, of the C2c2 amino acid sequence set forth in any of SEQ ID NOs: 835-845.

[0320] In some cases, a C2c2 protein comprises an amino acid sequence having at least 30%, at least 35%, at least 40%, at least 45%, at least 50%, at least 55%, at least 60%, at least 65%, at least 70%, at least 75%, at least 80%, at least 85%, at least 90%, at least 95%, at least 90%, or 100%, amino acid sequence identity to the RuvCI domain of the C2c2 amino acid sequence set forth in any of SEQ ID NOs: 835-845. In some cases, a C2c2 protein comprises an amino acid sequence having at least 30%, at least 35%, at least 40%, at least 45%, at least 50%, at least 55%, at least 60%, at least 65%, at least 70%, at least 75%, at least 80%, at least 85%, at least 90%, at least 95%, at least 90%, or 100%, amino acid sequence identity to the RuvCII domain of the C2c2 amino acid sequence set forth in any of SEQ ID NOs: 835-845. In some cases, a C2c2 protein comprises an amino acid sequence having at least 30%, at least 35%, at least 40%, at least 45%, at least 50%, at least 55%, at least 60%, at least 65%, at least 70%, at least 75%, at least 80%, at least 85%, at least 90%, at least 95%, at least 90%, or 100%, amino acid sequence identity to the RuvCIII domain of the C2c2 amino acid sequence set forth in any of SEQ ID NOs: 835-845. In some cases, a C2c2 protein comprises an amino acid sequence having at least 30%, at least 35%, at least 40%, at least 45%, at least 50%, at least 55%, at least 60%, at least 65%, at least 70%, at least 75%, at least 80%, at least 85%, at least 90%, at least 95%, at least 90%, or 100%, amino acid sequence identity to the RuvCI, RuvCII, and RuvCIII domains of the C2c2 amino acid sequence set forth in any of SEQ ID NOs: 835-845.

[0321] In some cases, the C2c2 protein exhibits reduced enzymatic activity relative to a wild-type C2c2 protein (e.g., relative to a C2c2 protein comprising the amino acid sequence set forth in any of SEQ ID NOs: 835-845), and retains DNA binding activity. In some cases, a suitable C2c2 protein comprises an amino acid sequence having at least 30%, at least 35%, at least 40%, at least 45%, at least 50%, at least 55%, at least 60%, at least 65%, at least 70%, at least 75%, at least 80%, at least 85%, at least 90%, at least 95%, at least 90%, or 100%, amino acid sequence identity to the C2c2 amino acid sequence set forth in any of SEQ ID NOs: 835-845.

[0322] Examples and guidance related to type V or type VI CRISPR/Cas endonucleases (including domain structure) and guide RNAs (as well as information regarding requirements related to protospacer adjacent motif (PAM) sequences present in targeted nucleic acids) can be found in the art, for example, see Zetsche et al., Cell. 2015 Oct. 22; 163(3):759-71; Makarova et al., Nat Rev Microbiol. 2015 Nov.; 13(11):722-36; Shmakov et al., Mol Cell. 2015 Nov. 5; 60(3):385-97; and Shmakov et al., Nat Rev Microbiol. 2017 Mar.; 15(3):169-182; and U.S. patents and patent applications: 9,580,701; 20170073695, 20170058272, 20160362668, 20160362667, 20160298078, 20160289637, 20160215300, 20160208243, and 20160208241, each of which is hereby incorporated by reference in its entirety.

### CasX and CasY Proteins

[0323] Suitable CRISPR/Cas effector polypeptides include CasX and CasY polypeptides. See, e.g., Burstein et al. (2017) Nature 542:237. Suitable CasX polypeptides include those described in WO 2018/064371. Suitable CasY polypeptides include those described in WO 2018/064352.

### CRISPR/Cas Effector Fusion Polypeptides

[0324] In some cases, a CRISPR/Cas effector polypeptide is a CRISPR/Cas effector fusion polypeptide comprising: i) a CRISPR/Cas effector polypeptide; and ii) a heterologous fusion partner.

[0325] In some cases, the fusion partner can modulate transcription (e.g., inhibit transcription, increase transcription) of a target DNA. For example, in some cases the fusion partner is a protein (or a domain from a protein) that inhibits transcription (e.g., a transcriptional repressor, a protein that functions via recruitment of transcription inhibitor proteins, modification of target DNA such as methylation, recruitment of a DNA modifier, modulation of histones associated with target DNA, recruitment of a histone modifier such as those that modify acetylation and/or methylation of histones, and the like). In some cases the fusion partner is a protein (or a domain from a protein) that increases transcription (e.g., a transcription activator, a protein that acts via recruitment of transcription activator proteins, modification of target DNA such as demethylation, recruitment of a DNA modifier, modulation of histones associated with target DNA, recruitment of a histone modifier such as those that modify acetylation and/or methylation of histones, and the like).

[0326] In some cases, a CRISPR/Cas effector fusion polypeptide includes a heterologous polypeptide that has enzymatic activity that modifies a target nucleic acid (e.g., nuclease activity such as FokI nuclease activity, methyltransferase activity, demethylase activity, DNA repair activity, DNA damage activity, deamination activity, dismutase activity, alkylation activity, depurination activity, oxidation activity, pyrimidine dimer forming activity, integrase activity, transposase activity, recombinase activity, polymerase activity, ligase activity, helicase activity, photolyase activity or glycosylase activity).

[0327] In some cases, a CRISPR/Cas effector fusion polypeptide includes a heterologous polypeptide that has enzymatic activity that modifies a polypeptide (e.g., a histone) associated with a target nucleic acid (e.g., methyltransferase activity, demethylase activity, acetyltransferase activity, deacetylase activity, kinase activity, phosphatase activity, ubiquitin ligase activity, deubiquitinating activity, adenylation activity, deadenylation activity, SUMOylating activity, deSUMOylating activity, ribosylation activity, deribosylation activity, myristoylation activity or demyristoylation activity).

[0328] Examples of proteins (or fragments thereof) that can be used in increase transcription, and that are suitable as heterologous fusion partners, include but are not limited to: transcriptional activators such as VP16, VP64, VP48, VP160, p65 subdomain (e.g., from NFkB), and activation domain of EDLL and/or TAL activation domain (e.g., for activity in plants); histone lysine methyltransferases such as SET1A, SET1B, MLL1 to 5, ASH1, SYMD2, NSD1, and the like; histone lysine demethylases such as JHDM2a/b, UTX, JMJD3, and the like; histone acetyltransferases such as GCN5, PCAF, CBP, p300, TAF1, TIP60/PLIP, MOZ/MYST3, MORF/MYST4, SRC1, ACTR, P160, CLOCK, and the like; and DNA demethylases such as Ten-Eleven Translocation (TET) dioxygenase 1 (TET1CD), TET1, DME, DML1, DML2, ROS1, and the like.

[0329] Examples of proteins (or fragments thereof) that can be used in decrease transcription, and that are suitable as heterologous fusion partners, include but are not limited to: transcriptional repressors such as the Kruppel associated box (KRAB or SKD); KOX1 repression domain; the Mad mSIN3 interaction domain (SID); the ERF repressor domain (ERD), the SRDX repression domain (e.g., for repression in plants), and the like; histone lysine methyltransferases such as Pr-SET7/8, SUV4-20H1, RIZ1, and the like; histone lysine demethylases such as JMJD2A/JHDM3A, JMJD2B, JMJD2C/GASC1, JMJD2D, JARID1A/RBP2, JARID1B/PLU-1, JARID1C/SMCX, JARID1D/SMCY, and the like; histone lysine deacetylases such as HDAC1, HDAC2, HDAC3, HDAC8, HDAC4, HDAC5, HDAC7, HDAC9, SIRT1, SIRT2, HDAC11, and the like; DNA methylases such as HhaI DNA m5c-methyltransferase (M.HhaI), DNA methyltransferase 1 (DNMT1), DNA methyltransferase 3a (DNMT3a), DNA methyltransferase 3b (DNMT3b), METI, DRM3 (plants), ZMET2, CMT1, CMT2 (plants), and the like; and periphery recruitment elements such as Lamin A, Lamin B, and the like.

[0330] In some cases, the fusion partner has enzymatic activity that modifies a target nucleic acid (e.g., ssRNA, dsRNA, ssDNA, dsDNA). Examples of enzymatic activity that can be provided by the fusion partner include but are not limited to: nuclease activity such as that provided by a restriction enzyme (e.g., FokI nuclease), methyltransferase activity such as that provided by a methyltransferase (e.g., HhaI DNA m5c-methyltransferase (M.HhaI), DNA methyltransferase 1 (DNMT1), DNA methyltransferase 3a (DNMT3a), DNA methyltransferase 3b (DNMT3b), METI, DRM3 (plants), ZMET2, CMT1, CMT2 (plants), and the like); demethylase activity such as that provided by a demethylase (e.g., Ten-Eleven Translocation (TET) dioxygenase 1 (TET1CD), TET1, DME, DML1, DML2, ROS1, and the like), DNA repair activity, DNA damage activity, deamination activity such as that provided by a deaminase (e.g., a cytosine deaminase enzyme such as rat APOBEC1), dismutase activity, alkylation activity, depurination activity, oxidation activity, pyrimidine dimer forming activity, integrase activity such as that provided by an integrase and/or resolvase (e.g., Gin invertase such as the hyperactive mutant of the Gin invertase, GinH106Y; human immunodeficiency virus type 1 integrase (IN); Tn3 resolvase; and the like), transposase activity, recombinase activity such as that provided by a recombinase (e.g., catalytic domain of Gin recombinase), polymerase activity, ligase activity, helicase activity, photolyase activity, and glycosylase activity).

[0331] In some cases, the fusion partner has enzymatic activity that modifies a protein associated with a target nucleic acid (e.g., ssRNA, dsRNA, ssDNA, dsDNA) (e.g., a histone, an RNA binding protein, a DNA binding protein, and the like). Examples of enzymatic activity (that modifies a protein associated with a target nucleic acid) that can be provided by the fusion partner include but are not limited to: methyltransferase activity such as that provided by a histone methyltransferase (HMT) (e.g., suppressor of variegation 3-9 homolog 1 (SUV39H1, also known as KMT1A), euchromatic histone lysine methyltransferase 2 (G9A, also known as KMT1C and EHMT2), SUV39H2, ESET/SETDB1, and the like, SET1A, SET1B, MLL1 to 5, ASH1, SYMD2, NSD1, DOT1L, Pr-SET7/8, SUV4-20H1, EZH2, RIZ1), demethylase activity such as that provided by a histone demethylase (e.g., Lysine Demethylase 1A (KDM1A also known as LSD1), JHDM2a/b, JMJD2A/JHDM3A, JMJD2B, JMJD2C/GASC1, JMJD2D, JARID1A/RBP2, JARID1B/PLU-1, JARID1C/SMCX, JARID1D/SMCY, UTX, JMJD3, and the like), acetyltransferase activity such as that provided by a histone acetyl transferase (e.g., catalytic core/fragment of the human acetyltransferase p300, GCN5, PCAF, CBP, TAF1, TIP60/PLIP, MOZ/MYST3, MORF/MYST4, HBO1/MYST2, HMOF/MYST1, SRC1, ACTR, P160, CLOCK, and the like), deacetylase activity such as that provided by a histone deacetylase (e.g., HDAC1, HDAC2, HDAC3, HDAC8, HDAC4, HDAC5, HDAC7, HDAC9, SIRT1, SIRT2, HDAC11, and the like), kinase activity, phosphatase activity, ubiquitin ligase activity, deubiquitinating activity, adenylation activity, deadenylation activity, SUMOylating activity, deSUMOylating activity, ribosylation activity, deribosylation activity, myristoylation activity, and demyristoylation activity.

[0332] In some cases, a fusion protein comprises: a) a catalytically inactive CRISPR/Cas effector polypeptide (e.g., a catalytically inactive Cas9 polypeptide); and b) a catalytically active endonuclease. For example, in some cases, the catalytically active endonuclease is a FokI polypeptide. As one non-limiting example, in some cases, a fusion protein comprises: a) a catalytically inactive Cas9 protein (or other catalytically inactive CRISPR effector polypeptide); and b) is a FokI nuclease comprising an amino acid sequence having at least at least 85%, at least 90%, at least 95%, at least 98%, at least 99%, or 100%, amino acid sequence identity to the FokI amino acid sequence provided below; where the FokI nuclease has a length of from about 195 amino acids to about 200 amino acids.

### FokI Nuclease Amino Acid Sequence:

(SEQ ID NO: 901)
QLVKSELEEKKSELRHKLKYVPHEYIELIEIARNS
TQDRILEMKVMEFFMKVYGYRGKHLGGSRKPDGAI
YTVGSPIDYGVIVDTKAYSGGYNLPIGQADEMQRY
VEENQTRNKHINPNEWWKVYPSSVTEFKFLFVSGH
FKGNYKAQLTRLNHITNCNGAVLSVEELLIGGEMI
KAGTLTLEEVRRKFNNGEINF.

[0333] In some cases, the fusion partner is a deaminase. Thus, in some cases, a CRISPR/Cas effector polypeptide fusion polypeptide comprises: a) a CRISPR/Cas effector polypeptide; and b) a deaminase. In some cases, the CRISPR/Cas effector polypeptide is catalytically inactive. Suitable deaminases include a cytidine deaminase and an adenosine deaminase.

[0334] A suitable adenosine deaminase is any enzyme that is capable of deaminating adenosine in DNA. In some cases, the deaminase is a TadA deaminase.

[0335] In some cases, a suitable adenosine deaminase comprises an amino acid sequence having at least 80%, at least 85%, at least 90%, at least 95%, at least 98%, at least 99%, or 100%, amino acid sequence identity to the following amino acid sequence:

(SEQ ID NO: 902)
MSEVEFSHEYWMRHALTLAKRAWDEREVPVGAVLVHNNRVIGEGWNRPIG
RHDPTAHAEIMALRQGGLVMQNYRLIDATLYVTLEPCVMCAGAMIHSRIG
RVVFGARDAKTGAAGSLMDVLHHPGMNHRVEITEGILADECAALLSDFFR
MRRQEIKAQKKAQSSTD

[0336] In some cases, a suitable adenosine deaminase comprises an amino acid sequence having at least 80%, at least 85%, at least 90%, at least 95%, at least 98%, at least 99%, or 100%, amino acid sequence identity to the following amino acid sequence:

(SEQ ID NO: 903)
MRRAFITGVFFLSEVEFSHEYWMRHALTLAKRAWD
EREVPVGAVLVHNNRVIGEGWNRPIGRHDPTAHAE
IMALRQGGLVMQNYRLIDATLYVTLEPCVMCAGAM
IHSRIGRVVFGARDAKTGAAGSLMDVLHHPGMNHR
VEITEGILADECAALLSDFFRMRRQEIKAQKKAQS
STD.

[0337] In some cases, a suitable adenosine deaminase comprises an amino acid sequence having at least 80%, at least 85%, at least 90%, at least 95%, at least 98%, at least 99%, or 100%, amino acid sequence identity to the following Staphylococcus aureus TadA amino acid sequence:

(SEQ ID NO: 904)
MGSHMTNDIYFMTLAIEEAKKAAQLGEVPIGAIIT
KDDEVIARAHNLRETLQQPTAHAEHIAIERAAKVL
GSWRLEGCTLYVTLEPCVMCAGTIVMSRIPRVVYG
ADDPKGGCSGSLMNLLQQSNFNHRAIVDKGVLKEA
CSTLLTTFFKNLRANKKSTN:

[0338] In some cases, a suitable adenosine deaminase comprises an amino acid sequence having at least 80%, at least 85%, at least 90%, at least 95%, at least 98%, at least 99%, or 100%, amino acid sequence identity to the following Bacillus subtilis TadA amino acid sequence:

(SEQ ID NO: 905)
MTQDELYMKEAIKEAKKAEEKGEVPIGAVLVINGE
IIARAHNLRETEQRSIAHAEMLVIDEACKALGTWR
LEGATLYVTLEPCPMCAGAVVLSRVEKVVFGAFDP
KGGCSGTLMNLLQEERFNHQAEVVSGVLEEECGGM
LSAFFRELRKKKKAARKNLSE

[0339] In some cases, a suitable adenosine deaminase comprises an amino acid sequence having at least 80%, at least 85%, at least 90%, at least 95%, at least 98%, at least 99%, or 100%, amino acid sequence identity to the following Salmonella typhimurium TadA:

(SEQ ID NO: 906)
MPPAFITGVTSLSDVELDHEYWMRHALTLAKRAWD
EREVPVGAVLVHNHRVIGEGWNRPIGRHDPTAHAE
IMALRQGGLVLQNYRLLDTTLYVTLEPCVMCAGAM
VHSRIGRVVFGARDAKTGAAGSLIDVLHHPGMNHR
VEIIEGVLRDECATLLSDFFRMRRQEIKALKKADR
AEGAGPAV

[0340] In some cases, a suitable adenosine deaminase comprises an amino acid sequence having at least 80%, at least 85%, at least 90%, at least 95%, at least 98%, at least 99%, or 100%, amino acid sequence identity to the following Shewanella putrefaciens TadA amino acid sequence:

(SEQ ID NO: 907)
MDEYWMQVAMQMAEKAEAAGEVPVGAVLVKDGQQI
ATGYNLSISQHDPTAHAEILCLRSAGKKLENYRLL
DATLYITLEPCAMCAGAMVHSRIARVVYGARDEKT
GAAGTVVNLLQHPAFNHQVEVTSGVLAEACSAQLS
RFFKRRRDEKKALKLAQRAQQGIE

[0341] In some cases, a suitable adenosine deaminase comprises an amino acid sequence having at least 80%, at least 85%, at least 90%, at least 95%, at least 98%, at least 99%, or 100%, amino acid sequence identity to the following Haemophilus influenzae F3031 TadA amino acid sequence:

(SEQ ID NO: 908)
MDAAKVRSEFDEKMMRYALELADKAEALGEIPVGA
VLVDDARNIIGEGWNLSIVQSDPTAHAEIIALRNG
AKNIQNYRLLNSTLYVTLEPCTMCAGAILHSRIKR
LVFGASDYKTGAIGSRFHFFDDYKMNHTLEITSGV
LAEECSQKLSTFFQKRREEKKIEKALLKSLSDK

[0342] In some cases, a suitable adenosine deaminase comprises an amino acid sequence having at least 80%, at least 85%, at least 90%, at least 95%, at least 98%, at least 99%, or 100%, amino acid sequence identity to the following Caulobacter crescentus TadA amino acid sequence:

(SEQ ID NO: 909)
MRTDESEDQDHRMMRLALDAARAAAEAGETPVGAV
ILDPSTGEVIATAGNGPIAAHDPTAHAEIAAMRAA
AAKLGNYRLTDLTLVVTLEPCAMCAGAISHARIGR
VVFGADDPKGGAVVHGPKFFAQPTCHWRPEVTGGV
LADESADLLRGFFRARRKAKI

[0343] In some cases, a suitable adenosine deaminase comprises an amino acid sequence having at least 80%, at least 85%, at least 90%, at least 95%, at least 98%, at least 99%, or 100%, amino acid sequence identity to the following Geobacter sulfurreducens TadA amino acid sequence:

(SEQ ID NO: 910)
MSSLKKTPIRDDAYWMGKAIREAAKAAARDEVPIG
AVIVRDGAVIGRGHNLREGSNDPSAHAEMIAIRQA
ARRSANWRLTGATLYVTLEPCLMCMGAIILARLER
VVFGCYDPKGGAAGSLYDLSADPRLNHQVRLSPGV
CQEECGTMLSDFFRDLRRRKKAKATPALFIDERKV
PPEP

[0344] Cytidine deaminases suitable for inclusion in a CRISPR/Cas effector polypeptide fusion polypeptide include any enzyme that is capable of deaminating cytidine in DNA.

[0345] In some cases, the cytidine deaminase is a deaminase from the apolipoprotein B mRNA-editing complex (APOBEC) family of deaminases. In some cases, the APOBEC family deaminase is selected from the group consisting of APOBEC1 deaminase, APOBEC2 deaminase, APOBEC3A deaminase, APOBEC3B deaminase, APOBEC3C deaminase, APOBEC3D deaminase, APOBEC3F deaminase, APOBEC3G deaminase, and APOBEC3H deaminase. In some cases, the cytidine deaminase is an activation induced deaminase (AID).

[0346] In some cases, a suitable cytidine deaminase comprises an amino acid sequence having at least 80%, at least 85%, at least 90%, at least 95%, at least 98%, at least 99%, or 100%, amino acid sequence identity to the following amino acid sequence:

(SEQ ID NO: 911)
[sequence omitted]

[0347] In some cases, a suitable cytidine deaminase is an AID and comprises an amino acid sequence having at least 80%, at least 85%, at least 90%, at least 95%, at least 98%, at least 99%, or 100%, amino acid sequence identity to the following amino acid sequence: MDSLLMNRRK FLYQFKNVRW AKGRRETYLC YVVKRRDSAT SFSLDFGYLR NKNGCHVELL FLRYISDWDL DPGRCYRVTW FTSWSPCYDC ARHVADFLRG NPNLSLRIFT ARLYFCEDRK AEPEGLRRLH RAGVQIAIMT FKENHERTFK AWEGLHENSV RLSRQLRRIL LPLYEVDDLR DAFRTLGL (SEQ ID NO:912).

[0348] In some cases, a suitable cytidine deaminase is an AID and comprises an amino acid sequence having at least 80%, at least 85%, at least 90%, at least 95%, at least 98%, at least 99%, or 100%, amino acid sequence identity to the following amino acid sequence: [sequence omitted] (SEQ ID NO:913).

[0349] In some cases, a CRISPR/Cas effector polypeptide fusion polypeptide comprises a CRISPR/Cas effector polypeptide that exhibits nickase activity. Suitable nickases are described elsewhere herein.

[0350] In some cases, a fusion CRISPR/Cas effector polypeptide comprises one or more localization signal peptides. Suitable localization signals (“subcellular localization signals”) include, e.g., a nuclear localization signal (NLS) for targeting to the nucleus; a sequence to keep the fusion protein out of the nucleus, e.g., a nuclear export sequence (NES); a sequence to keep the fusion protein retained in the cytoplasm; a mitochondrial localization signal for targeting to the mitochondria; a chloroplast localization signal for targeting to a chloroplast; an endoplasmic reticulum (ER) retention signal; and ER export signal; and the like. In some cases, a fusion polypeptide does not include an NLS so that the protein is not targeted to the nucleus (which can be advantageous, e.g., when the target nucleic acid is an RNA that is present in the cytosol).

[0351] In some cases, a fusion polypeptide includes (is fused to) a nuclear localization signal (NLS) (e.g., in some cases 2 or more, 3 or more, 4 or more, or 5 or more NLSs). Thus, in some cases, a fusion polypeptide includes one or more NLSs (e.g., 2 or more, 3 or more, 4 or more, or 5 or more NLSs). In some cases, one or more NLSs (2 or more, 3 or more, 4 or more, or 5 or more NLSs) are positioned at or near (e.g., within 50 amino acids of) the N-terminus and/or the C-terminus. In some cases, one or more NLSs (2 or more, 3 or more, 4 or more, or 5 or more NLSs) are positioned at or near (e.g., within 50 amino acids of) the N-terminus. In some cases, one or more NLSs (2 or more, 3 or more, 4 or more, or 5 or more NLSs) are positioned at or near (e.g., within 50 amino acids of) the C-terminus. In some cases, one or more NLSs (3 or more, 4 or more, or 5 or more NLSs) are positioned at or near (e.g., within 50 amino acids of) both the N-terminus and the C-terminus. In some cases, an NLS is positioned at the N-terminus and an NLS is positioned at the C-terminus.

[0352] In some cases, a fusion polypeptide includes (is fused to) between 1 and 10 NLSs (e.g., 1-9, 1-8, 1-7, 1-6, 1-5, 2-10, 2-9, 2-8, 2-7, 2-6, or 2-5 NLSs). In some cases, a fusion polypeptide includes (is fused to) between 2 and 5 NLSs (e.g., 2-4, or 2-3 NLSs).

[0353] Non-limiting examples of NLSs include an NLS sequence derived from: the NLS of the SV40 virus large T-antigen, having the amino acid sequence PKKKRKV (SEQ ID NO:914); the NLS from nucleoplasmin (e.g., the nucleoplasmin bipartite NLS with the sequence KRPAATKKAGQAKKKK (SEQ ID NO:915)); the c-myc NLS having the amino acid sequence PAAKRVKLD (SEQ ID NO:916) or RQRRNELKRSP (SEQ ID NO:917); the hRNPA1 M9 NLS having the sequence NQSSNFGPMKGGNFGGRSSGPYGGGGQYFAKPRNQGGY (SEQ ID NO:918); the sequence RMRIZFKNKGKDTAELRRRRVEVSVELRKAKKDEQILKRRNV (SEQ ID NO:919) of the IBB domain from importin-alpha; the sequences VSRKRPRP (SEQ ID NO:920) and PPKKARED (SEQ ID NO:921) of the myoma T protein; the sequence PQPKKKPL (SEQ ID NO:922) of human p53; the sequence SALIKKKKKMAP (SEQ ID NO:923) of mouse c-abl IV; the sequences DRLRR (SEQ ID NO:924) and PKQKKRK (SEQ ID NO:925) of the influenza virus NS1; the sequence RKLKKKIKKL (SEQ ID NO:926) of the Hepatitis virus delta antigen; the sequence REKKKFLKRR (SEQ ID NO:927) of the mouse Mxl protein; the sequence KRKGDEVDGVDEVAKKKSKK (SEQ ID NO:928) of the human poly(ADP-ribose) polymerase; and the sequence RKCLQAGMNLEARKTKK (SEQ ID NO:929) of the steroid hormone receptors (human) glucocorticoid. In some cases, an NLS comprises the amino acid sequence MDSLLMNRRKFLYQFKNVRWAKGRRETYLC (SEQ ID NO:930). In general, NLS (or multiple NLSs) are of sufficient strength to drive accumulation of the fusion polypeptide in a detectable amount in the nucleus of a eukaryotic cell. Detection of accumulation in the nucleus may be performed by any suitable technique. For example, a detectable marker may be fused to the fusion polypeptide such that location within a cell may be visualized. Cell nuclei may also be isolated from cells, the contents of which may then be analyzed by any suitable process for detecting protein, such as immunohistochemistry, Western blot, or enzyme activity assay. Accumulation in the nucleus may also be determined indirectly.

[0354] In some cases, a CRISPR/Cas effector polypeptide fusion polypeptide includes a “Protein Transduction Domain” or PTD (also known as a CPP—cell penetrating peptide), which refers to a polypeptide, polynucleotide, carbohydrate, or organic or inorganic compound that facilitates traversing a lipid bilayer, micelle, cell membrane, organelle membrane, or vesicle membrane. A PTD attached to another molecule, which can range from a small polar molecule to a large macromolecule and/or a nanoparticle, facilitates the molecule traversing a membrane, for example going from extracellular space to intracellular space, or cytosol to within an organelle. In some embodiments, a PTD is covalently linked to the amino terminus of a polypeptide. In some embodiments, a PTD is covalently linked to the carboxyl terminus of a polypeptide. In some cases, the PTD is inserted internally in the fusion polypeptide (i.e., is not at the N- or C-terminus of the fusion polypeptide) at a suitable insertion site. In some cases, a subject fusion polypeptide includes (is conjugated to, is fused to) one or more PTDs (e.g., two or more, three or more, four or more PTDs). In some cases, a PTD includes a nuclear localization signal (NLS) (e.g., in some cases 2 or more, 3 or more, 4 or more, or 5 or more NLSs). Thus, in some cases, a fusion polypeptide includes one or more NLSs (e.g., 2 or more, 3 or more, 4 or more, or 5 or more NLSs). In some embodiments, a PTD is covalently linked to a nucleic acid (e.g., a guide nucleic acid, a polynucleotide encoding a guide nucleic acid, a polynucleotide encoding a fusion polypeptide, a donor polynucleotide, etc.). Examples of PTDs include but are not limited to a minimal undecapeptide protein transduction domain (corresponding to residues 47-57 of HIV-1 TAT comprising YGRKKRRQRRR; SEQ ID NO:931); a polyarginine sequence comprising a number of arginines sufficient to direct entry into a cell (e.g., 3, 4, 5, 6, 7, 8, 9, 10, or 10-50 arginines); a VP22 domain (Zender et al. (2002) Cancer Gene Ther. 9(6):489-96); an Drosophila Antennapedia protein transduction domain (Noguchi et al. (2003) Diabetes 52(7):1732-1737); a truncated human calcitonin peptide (Trehin et al. (2004) Pharm. Research 21:1248-1256); polylysine (Wender et al. (2000) Proc. Natl. Acad. Sci. USA 97:13003-13008); RRQRRTSKLMKR (SEQ ID NO:932); Transportan GWTLNSAGYLLGKINLKALAALAKKIL (SEQ ID NO:933); KALAWEAKLAKALAKALAKHLAKALAKALKCEA (SEQ ID NO:934); and RQIKIWFQNRRMKWKK (SEQ ID NO:935). Exemplary PTDs include but are not limited to, YGRKKRRQRRR (SEQ ID NO:936), RKKRRQRRR (SEQ ID NO:937); an arginine homopolymer of from 3 arginine residues to 50 arginine residues; Exemplary PTD domain amino acid sequences include, but are not limited to, any of the following: YGRKKRRQRRR (SEQ ID NO:938); RKKRRQRR (SEQ ID NO:939); YARAAARQARA (SEQ ID NO:940); THRLPRRRRRR (SEQ ID NO:941); and GGRRARRRRRR (SEQ ID NO:942). In some embodiments, the PTD is an activatable CPP (ACPP) (Aguilera et al. (2009) Integr Biol (Camb) June; 1(5-6): 371-381). ACPPs comprise a polycationic CPP (e.g., Arg9 or “R9”) connected via a cleavable linker to a matching polyanion (e.g., Glu9 or “E9”), which reduces the net charge to nearly zero and thereby inhibits adhesion and uptake into cells. Upon cleavage of the linker, the polyanion is released, locally unmasking the polyarginine and its inherent adhesiveness, thus “activating” the ACPP to traverse the membrane.

### Guide RNA

[0355] Where a target polypeptide is a CRISPR/Cas effector polypeptide, in some cases, the CRISPR/Cas effector polypeptide is complexed with a CRISPR/Cas effector polypeptide guide RNA (also referred to as a “CRISPR-Cas guide RNA”).

[0356] A nucleic acid molecule that binds to a CRISPR/Cas effector polypeptide protein and targets the complex to a specific location within a target nucleic acid is referred to herein as a “CRISPR/Cas effector polypeptide guide RNA” or simply a “guide RNA.”

[0357] A guide RNA (can be said to include two segments, a first segment (referred to herein as a “targeting segment”); and a second segment (referred to herein as a “protein-binding segment”). By “segment” it is meant a segment/section/region of a molecule, e.g., a contiguous stretch of nucleotides in a nucleic acid molecule. A segment can also mean a region/section of a complex such that a segment may comprise regions of more than one molecule. The “targeting segment” is also referred to herein as a “variable region” of a guide RNA. The “protein-binding segment” is also referred to herein as a “constant region” of a guide RNA. In some cases, the guide RNA is a Cas9 guide RNA.

[0358] The first segment (targeting segment) of a guide RNA includes a nucleotide sequence (a guide sequence) that is complementary to (and therefore hybridizes with) a specific sequence (a target site) within a target nucleic acid (e.g., a target ssRNA, a target ssDNA, the complementary strand of a double stranded target DNA, etc.). The protein-binding segment (or “protein-binding sequence”) interacts with (binds to) a CRISPR/Cas effector polypeptide. The protein-binding segment of a guide RNA includes two complementary stretches of nucleotides that hybridize to one another to form a double stranded RNA duplex (dsRNA duplex). Site-specific binding and/or cleavage of a target nucleic acid (e.g., genomic DNA) can occur at locations (e.g., target sequence of a target locus) determined by base-pairing complementarity between the guide RNA (the guide sequence of the guide RNA) and the target nucleic acid.

[0359] A guide RNA and a CRISPR/Cas effector polypeptide form a complex (e.g., bind via non-covalent interactions). The guide RNA provides target specificity to the complex by including a targeting segment, which includes a guide sequence (a nucleotide sequence that is complementary to a sequence of a target nucleic acid). The CRISPR/Cas effector polypeptide of the complex provides the site-specific activity (e.g., cleavage activity or an activity provided by the CRISPR/Cas effector polypeptide when the CRISPR/Cas effector polypeptide is a CRISPR/Cas effector polypeptide fusion polypeptide, i.e., has a fusion partner). In other words, the CRISPR/Cas effector polypeptide is guided to a target nucleic acid sequence (e.g. a target sequence in a chromosomal nucleic acid, e.g., a chromosome; a target sequence in an extrachromosomal nucleic acid, e.g. an episomal nucleic acid, a minicircle, an ssRNA, an ssDNA, etc.; a target sequence in a mitochondrial nucleic acid; a target sequence in a chloroplast nucleic acid; a target sequence in a plasmid; a target sequence in a viral nucleic acid; etc.) by virtue of its association with the guide RNA.

[0360] The “guide sequence” also referred to as the “targeting sequence” of a guide RNA can be modified so that the guide RNA can target a CRISPR/Cas effector polypeptide to any desired sequence of any desired target nucleic acid, with the exception that the protospacer adjacent motif (PAM) sequence can be taken into account. Thus, for example, a guide RNA can have a targeting segment with a sequence (a guide sequence) that has complementarity with (e.g., can hybridize to) a sequence in a nucleic acid in a eukaryotic cell, e.g., a viral nucleic acid, a eukaryotic nucleic acid (e.g., a eukaryotic chromosome, chromosomal sequence, a eukaryotic RNA, etc.), and the like.

[0361] In some embodiments, a guide RNA includes two separate nucleic acid molecules: an “activator” and a “targeter” and is referred to herein as a “dual guide RNA”, a “double-molecule guide RNA”, or a “two-molecule guide RNA” a “dual guide RNA”, or a “dgRNA.” In some embodiments, the activator and targeter are covalently linked to one another (e.g., via intervening nucleotides) and the guide RNA is referred to as a “single guide RNA”, a “Cas9 single guide RNA”, a “single-molecule Cas9 guide RNA,” or a “one-molecule Cas9 guide RNA”, or simply “sgRNA.”

[0362] A guide RNA comprises a crRNA-like (“CRISPR RNA”/“targeter”/“crRNA”/“crRNA repeat”) molecule and a corresponding tracrRNA-like (“trans-acting CRISPR RNA”/“activator”/“tracrRNA”) molecule. A crRNA-like molecule (targeter) comprises both the targeting segment (single stranded) of the guide RNA and a stretch (“duplex-forming segment”) of nucleotides that forms one half of the dsRNA duplex of the protein-binding segment of the guide RNA. A corresponding tracrRNA-like molecule (activator/tracrRNA) comprises a stretch of nucleotides (duplex-forming segment) that forms the other half of the dsRNA duplex of the protein-binding segment of the guide nucleic acid. In other words, a stretch of nucleotides of a crRNA-like molecule are complementary to and hybridize with a stretch of nucleotides of a tracrRNA-like molecule to form the dsRNA duplex of the protein-binding domain of the guide RNA. As such, each targeter molecule can be said to have a corresponding activator molecule (which has a region that hybridizes with the targeter). The targeter molecule additionally provides the targeting segment. Thus, a targeter and an activator molecule (as a corresponding pair) hybridize to form a guide RNA. The exact sequence of a given crRNA or tracrRNA molecule is characteristic of the species in which the RNA molecules are found. A dual guide RNA can include any corresponding activator and targeter pair.

[0363] The term “activator” or “activator RNA” is used herein to mean a tracrRNA-like molecule (tracrRNA: “trans-acting CRISPR RNA”) of a dual guide RNA (and therefore of a single guide RNA when the “activator” and the “targeter” are linked together by, e.g., intervening nucleotides). Thus, for example, a guide RNA (dgRNA or sgRNA) comprises an activator sequence (e.g., a tracrRNA sequence). A tracr molecule (a tracrRNA) is a naturally existing molecule that hybridizes with a CRISPR RNA molecule (a crRNA) to form a dual guide RNA. The term “activator” is used herein to encompass naturally existing tracrRNAs, but also to encompass tracrRNAs with modifications (e.g., truncations, sequence variations, base modifications, backbone modifications, linkage modifications, etc.) where the activator retains at least one function of a tracrRNA (e.g., contributes to the dsRNA duplex to which Cas9 protein binds). In some cases, the activator provides one or more stem loops that can interact with Cas9 protein. An activator can be referred to as having a tracr sequence (tracrRNA sequence) and in some cases is a tracrRNA, but the term “activator” is not limited to naturally existing tracrRNAs.

[0364] The term “targeter” or “targeter RNA” is used herein to refer to a crRNA-like molecule (crRNA: “CRISPR RNA”) of a dual guide RNA (and therefore of a single guide RNA when the “activator” and the “targeter” are linked together, e.g., by intervening nucleotides). Thus, for example, a guide RNA (dgRNA or sgRNA) comprises a targeting segment (which includes nucleotides that hybridize with (are complementary to) a target nucleic acid, and a duplex-forming segment (e.g., a duplex forming segment of a crRNA, which can also be referred to as a crRNA repeat). Because the sequence of a targeting segment (the segment that hybridizes with a target sequence of a target nucleic acid) of a targeter is modified by a user to hybridize with a desired target nucleic acid, the sequence of a targeter will often be a non-naturally occurring sequence. However, the duplex-forming segment of a targeter (described in more detail below), which hybridizes with the duplex-forming segment of an activator, can include a naturally existing sequence (e.g., can include the sequence of a duplex-forming segment of a naturally existing crRNA, which can also be referred to as a crRNA repeat). Thus, the term targeter is used herein to distinguish from naturally occurring crRNAs, despite the fact that part of a targeter (e.g., the duplex-forming segment) often includes a naturally occurring sequence from a crRNA. However, the term “targeter” encompasses naturally occurring crRNAs.

[0365] A guide RNA can also be said to include 3 parts: (i) a targeting sequence (a nucleotide sequence that hybridizes with a sequence of the target nucleic acid); (ii) an activator sequence (as described above)(in some cases, referred to as a tracr sequence); and (iii) a sequence that hybridizes to at least a portion of the activator sequence to form a double stranded duplex. A targeter has (i) and (iii); while an activator has (ii).

[0366] A guide RNA (e.g. a dual guide RNA or a single guide RNA) can be comprised of any corresponding activator and targeter pair. In some cases, the duplex forming segments can be swapped between the activator and the targeter. In other words, in some cases, the targeter includes a sequence of nucleotides from a duplex forming segment of a tracrRNA (which sequence would normally be part of an activator) while the activator includes a sequence of nucleotides from a duplex forming segment of a crRNA (which sequence would normally be part of a targeter).

[0367] As noted above, a targeter comprises both the targeting segment (single stranded) of the guide RNA and a stretch (“duplex-forming segment”) of nucleotides that forms one half of the dsRNA duplex of the protein-binding segment of the guide RNA. A corresponding tracrRNA-like molecule (activator) comprises a stretch of nucleotides (a duplex-forming segment) that forms the other half of the dsRNA duplex of the protein-binding segment of the guide RNA. In other words, a stretch of nucleotides of the targeter is complementary to and hybridizes with a stretch of nucleotides of the activator to form the dsRNA duplex of the protein-binding segment of a guide RNA. As such, each targeter can be said to have a corresponding activator (which has a region that hybridizes with the targeter). The targeter molecule additionally provides the targeting segment. Thus, a targeter and an activator (as a corresponding pair) hybridize to form a guide RNA. The particular sequence of a given naturally existing crRNA or tracrRNA molecule is characteristic of the species in which the RNA molecules are found. Examples of suitable activator and targeter are well known in the art.

### Nucleic Acid Modifications

[0368] In some cases, a CRISPR-Cas guide RNA has one or more modifications, e.g., a base modification, a backbone modification, a sugar modification, etc., to provide the nucleic acid with a new or enhanced feature (e.g., improved stability).

[0369] Suitable nucleic acid modifications include, but are not limited to: 2′O-methyl modified nucleotides, 2′ fluoro modified nucleotides, locked nucleic acid (LNA) modified nucleotides, peptide nucleic acid (PNA) modified nucleotides, nucleotides with phosphorothioate linkages, and a 5′ cap (e.g., a 7-methylguanylate cap (m7G)).

[0370] Suitable modified nucleic acid backbones containing a phosphorus atom therein include, for example, phosphorothioates, chiral phosphorothioates, phosphorodithioates, phosphotriesters, aminoalkylphosphotriesters, methyl and other alkyl phosphonates including 3′-alkylene phosphonates, 5′-alkylene phosphonates and chiral phosphonates, phosphinates, phosphoramidates including 3′-amino phosphoramidate and aminoalkylphosphoramidates, phosphorodiamidates, thionophosphoramidates, thionoalkylphosphonates, thionoalkylphosphotriesters, selenophosphates and boranophosphates having normal 3′-5′ linkages, 2′-5′ linked analogs of these, and those having inverted polarity wherein one or more internucleotide linkages is a 3′ to 3′, 5′ to 5′ or 2′ to 2′ linkage. Suitable oligonucleotides having inverted polarity comprise a single 3′ to 3′ linkage at the 3′-most internucleotide linkage i.e. a single inverted nucleoside residue which may be a basic (the nucleobase is missing or has a hydroxyl group in place thereof). Various salts (such as, for example, potassium or sodium), mixed salts and free acid forms are also included.

[0371] In some cases, a CRISPR-Cas guide RNA has one or more nucleotides that are linked by a phosphorothioate bond (i.e., the subject nucleic acid has one or more phosphorothioate linkages). The phosphorothioate (PS) bond (i.e., a phosphorothioate linkage) substitutes a sulfur atom for a non-bridging oxygen in the phosphate backbone of a nucleic acid (e.g., an oligo). This modification renders the internucleotide linkage resistant to nuclease degradation. Phosphorothioate bonds can be introduced between the last 3-5 nucleotides at the 5′- or 3′-end of the oligo to inhibit exonuclease degradation. Including phosphorothioate bonds within the oligo (e.g., throughout the entire oligo) can help reduce attack by endonucleases as well.

[0372] Also suitable are CRISPR-Cas guide RNAs having morpholino backbone structures as described in, e.g., U.S. Pat. No. 5,034,506. For example, in some embodiments, a CRISPR-Cas guide RNA comprises a 6-membered morpholino ring in place of a ribose ring. In some of these embodiments, a phosphorodiamidate or other non-phosphodiester internucleoside linkage replaces a phosphodiester linkage.

[0373] A CRISPR-Cas guide RNA can also include one or more substituted sugar moieties. Suitable polynucleotides comprise a sugar substituent group selected from: OH; F; O—, S—, or N-alkyl; O—, S—, or N-alkenyl; O—, S- or N-alkynyl; or O-alkyl-O-alkyl, wherein the alkyl, alkenyl and alkynyl may be substituted or unsubstituted C₁ to C₁₀ alkyl or C₂ to C₁₀ alkenyl and alkynyl. Particularly suitable are O((CH₂)ₙO)ₘCH₃, O(CH₂)ₙOCH₃, O(CH₂)ₙNH₂, O(CH₂)ₙCH₃, O(CH₂)ₙONH₂, and O(CH₂)ₙON((CH₂)ₙCH₃)₂, where n and m are from 1 to about 10. Other suitable polynucleotides comprise a sugar substituent group selected from: C₁ to C₁₀ lower alkyl, substituted lower alkyl, alkenyl, alkynyl, alkaryl, aralkyl, O-alkaryl or O-aralkyl, SH, SCH₃, OCN, Cl, Br, CN, CF₃, OCF₃, SOCH₃, SO₂CH₃, ONO₂, NO₂, N₃, NH₂, heterocycloalkyl, heterocycloalkaryl, aminoalkylamino, polyalkylamino, substituted silyl, an RNA cleaving group, a reporter group, an intercalator, a group for improving the pharmacokinetic properties of an oligonucleotide, or a group for improving the pharmacodynamic properties of an oligonucleotide, and other substituents having similar properties. A suitable modification includes 2′-methoxyethoxy (2′-O—CH₂ CH₂OCH₃, also known as 2′-O-(2-methoxyethyl) or 2′-MOE) (Martin et al., Helv. Chim. Acta, 1995, 78, 486-504) i.e., an alkoxyalkoxy group. A further suitable modification includes 2′-dimethylaminooxyethoxy, i.e., a O(CH₂)₂ON(CH₃)₂ group, also known as 2′-DMAOE, as described in examples herein below, and 2′-dimethylaminoethoxyethoxy (also known in the art as 2′-O-dimethyl-amino-ethoxy-ethyl or 2′-DMAEOE), i.e., 2′-O—CH₂—O—CH₂—N(CH₃)₂.

### Methods of Coupling Two Proteins Via a Coupling Protein

[0374] The present disclosure provides methods for chemoselective coupling of a first polypeptide and a second polypeptide via a coupling polypeptide. The product of the chemoselective coupling can comprise, in order from N-terminus to C-terminus: i) the first polypeptide; ii) the coupling polypeptide; and iii) the second polypeptide. The method takes advantage of the substrate preferences of tyrosinase polypeptides, as described above.

[0375] For example, in some cases, the present disclosure provides a method for chemoselective coupling of a first polypeptide and a second polypeptide to a coupling polypeptide, the method comprising: a) contacting the first polypeptide with the coupling polypeptide, to generate a first polypeptide-coupling polypeptide conjugate, where the first polypeptide comprises a thiol moiety (e.g., a Cys, where the Cys can be at any solvent-accessible position within the first polypeptide), where the coupling polypeptide comprises an N-terminal reactive moiety that forms a covalent bond with the thiol moiety present in the first polypeptide, where the coupling polypeptide comprising the N-terminal reactive moiety is generated by reaction of a polypeptide (a “coupling precursor polypeptide”) comprising an N-terminal phenol or catechol moiety and a C-terminal phenol or catechol moiety with a first enzyme capable of oxidizing the N-terminal phenol or catechol moiety, but not the C-terminal phenol or catechol moiety, to generate the N-terminal reactive moiety; and where the coupling polypeptide comprises two or more positively charged or neutral amino acids within ten amino acids of the N-terminal phenol or catechol moiety and two or more negatively charged amino acids within ten amino acids of the C-terminal phenol or catechol moiety; and b) contacting the second polypeptide with the first polypeptide-coupling polypeptide conjugate, where the second polypeptide comprises a thiol moiety (e.g. a Cys, where the Cys can be at any solvent-accessible position within the second polypeptide), where the first polypeptide-coupling polypeptide conjugate comprises a C-terminal reactive moiety that forms a covalent bond with the thiol moiety present in the second polypeptide, where the first polypeptide-coupling polypeptide conjugate comprising the C-terminal reactive moiety is generated by reaction of the first polypeptide-coupling polypeptide conjugate with a second enzyme capable of oxidizing the C-terminal phenol or catechol moiety to generate a C-terminal reactive moiety; and where said contacting generates a first polypeptide-coupling polypeptide-second polypeptide conjugate. In some cases, the first enzyme is a tyrosinase polypeptide comprising an amino acid sequence having at least 75% amino acid sequence identity to the abTYR amino acid sequence depicted in FIG. 8 or FIG. 9; and the second enzyme is a tyrosinase polypeptide comprising an amino acid sequence having at least 75% amino acid sequence identity to any one of the amino acid sequences depicted in any one of FIGS. 10A-10Z and 10AA-10VV.

[0376] As another example, in some cases, the present disclosure provides a method for chemoselective coupling of a first polypeptide and a second polypeptide to a coupling polypeptide, the method comprising: a) contacting the first polypeptide with the coupling polypeptide, to generate a first polypeptide-coupling polypeptide conjugate, where the first polypeptide comprises a thiol moiety, where the coupling polypeptide comprises an N-terminal reactive moiety that forms a covalent bond with the thiol moiety present in the first polypeptide, where the coupling polypeptide comprising the N-terminal reactive moiety is generated by reaction of a polypeptide comprising an N-terminal phenol or catechol moiety and a C-terminal phenol or catechol moiety with a first enzyme capable of oxidizing the N-terminal phenol or catechol moiety, but not the C-terminal phenol or catechol moiety, to generate the N-terminal reactive moiety; where the coupling polypeptide comprises two or more negatively charged amino acids within ten amino acids of the N-terminal phenol or catechol moiety and two or more positively charged or neutral amino acids within ten amino acids of the C-terminal phenol or catechol moiety; and b) contacting the second polypeptide with the first polypeptide-coupling polypeptide conjugate, where the second polypeptide comprises a thiol moiety, where the first polypeptide-coupling polypeptide conjugate comprises a C-terminal reactive moiety that forms a covalent bond with the thiol moiety present in the second polypeptide, where the first polypeptide-coupling polypeptide conjugate comprising the C-terminal reactive moiety is generated by reaction of the first polypeptide-coupling polypeptide conjugate with a second enzyme capable of oxidizing the C-terminal phenol or catechol moiety to generate a C-terminal reactive moiety; and where said contacting generates a first polypeptide-coupling polypeptide-second polypeptide conjugate. In some cases, the first enzyme is a tyrosinase polypeptide comprising an amino acid sequence having at least 75% amino acid sequence identity to any one of the amino acid sequences depicted in any one of FIGS. 10A-10Z and 10AA-10VV; and b) the second enzyme is a tyrosinase polypeptide comprising an amino acid sequence having at least 75% amino acid sequence identity to the abTYR amino acid sequence depicted in FIG. 8 or FIG. 9.

[0377] The coupling polypeptide can have a length of from 10 amino acids to 100 amino acids, or more than 100 amino acids. In some cases, the coupling polypeptide has a length of from 10 amino acids to 25 amino acids. In some cases, the coupling polypeptide has a length of from 25 amino acids to 50 amino acids. In some cases, the coupling polypeptide has a length of from 50 amino acids to 100 amino acids. In some cases, the coupling polypeptide has a length of more than 100 amino acids; e.g., in some cases, the coupling polypeptide has a length of from 100 amino acids to 200 amino acids, from 200 amino acids to 500 amino acids, or more than 500 amino acids (e.g., 500 to 1000, 1000 to 2000, or more than 2000, amino acids). In some cases, the N-terminal phenol moiety and the C-terminal phenol moiety are both tyrosines, and the enzymes that generate the reactive moieties are tyrosinases.

[0378] As noted above, in some cases, the coupling polypeptide comprises: a) two or more negatively charged amino acids within ten amino acids of the N-terminal phenol or catechol moiety; or b) two or more negatively charged amino acids within ten amino acids of the C-terminal phenol or catechol moiety. In such cases, the coupling polypeptide can comprise: a) 2, 3, 4, 5, 6, 7, 8, 9, or 10 negatively charged amino acids within ten amino acids of the N-terminal phenol or catechol moiety; or b) 2, 3, 4, 5, 6, 7, 8, 9, or 10 negatively charged amino acids within ten amino acids of the C-terminal phenol or catechol moiety. As one non-limiting example, the coupling polypeptide comprises the amino acid sequence: YEEEE(X)ₙRRRRY (SEQ ID NO: 961), where X is any amino acid, and where n is an integer from 0 to 40 (e.g., where n is an integer from 0 to 5, from 5 to 10, from 10 to 15, from 15 to 20, from 20 to 25, from 25 to 30, from 30 to 35, or from 35 to 40). As another non-limiting example, the coupling polypeptide comprises the amino acid sequence: YDDDD(X)ₙKKKKY (SEQ ID NO: 962), where X is any amino acid, and where n is an integer from 0 to 40 (e.g., where n is an integer from 0 to 5, from 5 to 10, from 10 to 15, from 15 to 20, from 20 to 25, from 25 to 30, from 30 to 35, or from 35 to 40).

[0379] As noted above, in some cases, the coupling polypeptide comprises: a) two or more positively charged amino acids within ten amino acids of the N-terminal phenol or catechol moiety; or b) two or more positively charged amino acids within ten amino acids of the C-terminal phenol or catechol moiety. In such cases, the coupling polypeptide can comprise: a) 2, 3, 4, 5, 6, 7, 8, 9, or 10 positively charged amino acids within ten amino acids of the N-terminal phenol or catechol moiety; or b) 2, 3, 4, 5, 6, 7, 8, 9, or 10 positively charged amino acids within ten amino acids of the C-terminal phenol or catechol moiety. As one non-limiting example, the coupling polypeptide comprises the amino acid sequence: YKKKK(X)ₙDDDDY (SEQ ID NO: 963), where X is any amino acid, and where n is an integer from 0 to 40 (e.g., where n is an integer from 0 to 5, from 5 to 10, from 10 to 15, from 15 to 20, from 20 to 25, from 25 to 30, from 30 to 35, or from 35 to 40). As another non-limiting example, the coupling polypeptide comprises the amino acid sequence: YRRRR(X)ₙEEEEY (SEQ ID NO: 964), where X is any amino acid, and where n is an integer from 0 to 40 (e.g., where n is an integer from 0 to 5, from 5 to 10, from 10 to 15, from 15 to 20, from 20 to 25, from 25 to 30, from 30 to 35, or from 35 to 40).

[0380] The present disclosure provides a coupling polypeptide, as described above. The present disclosure provides a composition comprising a coupling polypeptide of the present disclosure. The present disclosure provides a composition comprising: a) a coupling polypeptide of the present disclosure; and b) a buffer.

[0381] Suitable first and second polypeptides include any of the above-mentioned polypeptides. For example, in some cases, the first and/or the second polypeptide is an antibody (e.g., a single-chain antibody). As another example, in some cases, the first and/or the second polypeptide is a CRISPR/Cas effector polypeptide. As an example, in some cases, the first polypeptide is a CRISPR/Cas effector polypeptide; and the second polypeptide is an Ig Fc polypeptide. As another example, in some cases, the first polypeptide is a CRISPR/Cas effector polypeptide; and the second polypeptide is a nanobody. As another example, in some cases, the first polypeptide is a CRISPR/Cas effector polypeptide; and the second polypeptide is a scFv polypeptide.

### Methods of Coupling Two or More Polypeptides

[0382] The present disclosure provides a method of coupling two or more polypeptides to one another in a sequential manner. The method takes advantage of the substrate preferences of tyrosinase polypeptides, as described above. The method can be carried out on an insoluble substrate, i.e., an immobilized surface, such as a bead. Methods of the present disclosure for coupling two or more polypeptides to one another in a sequential manner are depicted schematically in FIG. 39A-39G.

[0383] Thus, the present disclosure provides method of covalently linking a first polypeptide to a second polypeptide, the method comprising: a) contacting the first polypeptide with an immobilized reactive moiety, where the immobilized reactive moiety is generated by reaction of an immobilized phenol moiety or catechol moiety with a first enzyme, wherein the first enzyme is capable of oxidizing the immobilized phenol moiety or catechol moiety, thereby generating the immobilized reactive moiety, where the first polypeptide comprises: i) a thiol moiety; and ii) a phenol moiety or a catechol moiety, wherein the first polypeptide comprises two or more negatively charged amino acids within ten amino acids of the phenol moiety or the catechol moiety, and where the immobilized reactive moiety forms a covalent bond with the thiol moiety present in the first polypeptide, thereby generating an immobilized first polypeptide; b) contacting the immobilized first polypeptide with second enzyme, where the second enzyme is capable of oxidizing the phenol moiety or the catechol moiety present in the first polypeptide to generate an immobilized first polypeptide comprising a reactive moiety; and c) contacting the immobilized first polypeptide comprising a reactive moiety with a second polypeptide, where the second polypeptide comprises: i) a thiol moiety; and ii) a phenol moiety or a catechol moiety, where the second polypeptide comprises two or more neutral or positively charged within ten amino acids of the phenol moiety or the catechol moiety, where the reactive moiety present in the immobilized first polypeptide forms a covalent bond with the thiol moiety present in the second polypeptide, thereby generating an immobilized conjugate comprising the first polypeptide covalently linked to the second polypeptide. In some cases, the first enzyme is a tyrosinase polypeptide comprising an amino acid sequence having at least 75% amino acid sequence identity to any one of the amino acid sequences depicted in any one of FIG. 8, FIG. 9, FIGS. 10A-10Z, and 10AA-10VV. In some cases, the thiol moiety present in the first polypeptide is present in a Cys (e.g., a solvent-accessible Cys; e.g., an N-terminal Cys), and wherein the phenol moiety present in the first polypeptide is present in a Tyr residue. In some cases, the Tyr residue is present in a stretch of amino acids comprising EEEY (SEQ ID NO: 953), EEEEY (SEQ ID NO: 955), DDDDY (SEQ ID NO: 965), or DDDDY (SEQ ID NO: 965). In some cases, the second enzyme is a tyrosinase polypeptide comprising an amino acid sequence having at least 75% amino acid sequence identity to any one of the amino acid sequences depicted in any one of FIGS. 10A-10Z and 10AA-10VV. In some cases, the second enzyme is a tyrosinase polypeptide comprising an amino acid sequence having at least 75%, at least 80%, at least 85%, at least 90%, at least 95%, at least 98%, at least 99%, or 100%, amino acid sequence identity to the amino acid sequence depicted in FIG. 10M, where the tyrosinase polypeptide comprises a substitution of D55 (e.g., comprises a D55K substitution).

[0384] The method can be used to link any number of polypeptides, in a sequential manner. For example, in some cases, the method further comprises c) contacting the immobilized conjugate with a third enzyme, wherein the third enzyme is capable of oxidizing the phenol moiety or the catechol moiety present in the second polypeptide to generate an immobilized conjugate comprising a reactive moiety; and d) contacting the immobilized conjugate comprising a reactive moiety with a third polypeptide, where the third polypeptide comprises: i) a thiol moiety; and ii) a phenol moiety or a catechol moiety, wherein the third polypeptide comprises two or more negatively charged within ten amino acids of the phenol moiety or the catechol moiety, and where the reactive moiety present in the immobilized conjugate forms a covalent bond with the thiol moiety present in the second polypeptide, thereby generating an immobilized conjugate comprising the third polypeptide covalently linked to the second polypeptide. In some cases, the third enzyme is a tyrosinase polypeptide comprising an amino acid sequence having at least 75% amino acid sequence identity to the amino acid sequence depicted in FIG. 8 or FIG. 9.

[0385] By alternating use of: a) a tyrosinase enzyme that preferentially modifies a Tyr residue that is present in a negatively charged environment (e.g., where the polypeptide comprises two or more negatively charged within ten amino acids of the Tyr residue); and b) a tyrosinase enzyme that preferentially modifies a Tyr residue that is present in a neutral or positively charged environment ((e.g., where the polypeptide comprises two or more neutral or positively charged within ten amino acids of the Tyr residue), a polypeptide substrate can be sequentially added to an immobilized conjugate comprising one, two, three, or more polypeptides. The method described above can be modified, e.g., such that the first polypeptide comprises: i) a thiol moiety; and ii) a phenol moiety or a catechol moiety, where the first polypeptide comprises two or more neutral or positively charged amino acids within ten amino acids of the phenol moiety or the catechol moiety; in such cases, the second polypeptide would then comprise: i) a thiol moiety; and ii) a phenol moiety or a catechol moiety, where the first polypeptide comprises two or more negatively charged amino acids within ten amino acids of the phenol moiety or the catechol moiety.

[0386] In some cases, the tyrosinase enzyme is inactivated or removed between any two steps of the method and before adding a further tyrosinase enzyme. For example, in some cases, between step (b) and step (c) of the method described above, the second enzyme is inactivated or removed. In some cases, the thiol moiety present in the second polypeptide is present in a Cys, and the phenol moiety present in the second polypeptide is present in a Tyr residue. In some cases, the Tyr residue is present in a stretch of amino acids comprising RRRY (SEQ ID NO: 949), RRRRY (SEQ ID NO: 951), KKKY (SEQ ID NO: 966), or KKKKY (SEQ ID NO: 967).

[0387] As depicted schematically in FIG. 39A, abTYR is used to link biotin-phenol and a first polypeptide (“Protein A”) comprising a thiol group and an EEEEY (SEQ ID NO:955) sequence, to generate a biotin-first polypeptide conjugate. The biotin-first polypeptide conjugate can be contacted with streptavidin beads, to immobilize the biotin-first polypeptide conjugate. A second polypeptide (“Protein B”) comprising a thiol group and an RRRRY (SEQ ID NO:951) sequence can be conjugated to the first polypeptide of the immobilized biotin-first polypeptide conjugate by action of bmTYR (D55K) (e.g., bmTYR (D55K) depicted in FIG. 10M), to generate an immobilized first polypeptide-second polypeptide conjugate. In some cases, two different polypeptides (e.g., “Protein A” and “Protein B”) are alternately added to the concatemer, as depicted in FIG. 39A, FIG. 39B, and FIG. 39C. Alternatively, multiple copies of a single polypeptide are concatenated, as depicted in FIG. 39D and FIG. 39E. As yet another possibility, in some cases, each of the polypeptides that is concatenated is different from the other polypeptides, as depicted in FIG. 39F and FIG. 39G (e.g., “Protein A”; “Protein B”; and “Protein C”).

### Compositions

[0388] Aspects of the disclosure further provides compositions, including pharmaceutical compositions, comprising a target molecule comprising a thiol of formula (III), and a biomolecule comprising a phenol moiety or a catechol moiety of formula (I):

[chemical structure]

[0389] where Y1 is a biomolecule, optionally comprising one or more moieties selected from, an active small molecule, an affinity tag, a fluorophore, and a metal-chelating agent; L is an optional linker; X1 is selected from hydrogen and hydroxyl; and Y2 is a second biomolecule.

[0390] In certain embodiments, there is provided a composition of a target molecule comprising a thiol of formula (III), and a pharmaceutically acceptable excipient.

[0391] In certain embodiments, there is provided a composition of a biomolecule comprising a phenol moiety or a catechol moiety of formula (I), and a pharmaceutically acceptable excipient.

[0392] In certain embodiments of the subject compositions, Y² is a CRISPR-Cas effector polypeptide, e.g., as described herein.

[0393] In certain embodiments of the subject compositions, formula (I) is described by any of the formulae (IA), (IAa), (IB), (IC), (ID), (IDa) and (IDb), as disclosed herein.

[0394] A subject composition generally comprises a subject target molecule comprising a thiol of formula (III); a biomolecule comprising a phenol moiety or a catechol moiety of formula (I); and at least one additional compound. Suitable additional compounds include, but are not limited to: a salt, such as a magnesium salt, a sodium salt, etc., e.g., NaCl, MgCl₂, KCl, MgSO₄, etc.; a buffering agent, e.g., a Tris buffer, N-(2-Hydroxyethyl)piperazine-N′-(2-ethanesulfonic acid) (HEPES), 2-(N-Morpholino)ethanesulfonic acid (MES), 2-(N-Morpholino)ethanesulfonic acid sodium salt (MES), 3-(N-Morpholino)propanesulfonic acid (MOPS), N-tris[Hydroxymethyl]methyl-3-aminopropanesulfonic acid (TAPS), etc.; a solubilizing agent; a detergent, e.g., a non-ionic detergent such as Tween-20, etc.; a protease inhibitor; and the like.

[0395] In some embodiments, a subject composition comprises a subject target molecule comprising a thiol of formula (III); a biomolecule comprising a phenol moiety or a catechol moiety of formula (I); and a pharmaceutically acceptable excipient. A wide variety of pharmaceutically acceptable excipients are known in the art and need not be discussed in detail herein. Pharmaceutically acceptable excipients have been amply described in a variety of publications, including, for example, A. Gennaro (2000) “Remington: The Science and Practice of Pharmacy,” 20^{th} edition, Lippincott, Williams, & Wilkins; Pharmaceutical Dosage Forms and Drug Delivery Systems (1999) H. C. Ansel et al., eds., 7^{th} ed., Lippincott, Williams, & Wilkins; and Handbook of Pharmaceutical Excipients (2000) A. H. Kibbe et al., eds., 3^{rd} ed. Amer. Pharmaceutical Assoc.

[0396] The pharmaceutically acceptable excipients, such as vehicles, adjuvants, carriers or diluents, are readily available to the public. Moreover, pharmaceutically acceptable auxiliary substances, such as pH adjusting and buffering agents, tonicity adjusting agents, stabilizers, wetting agents and the like, are readily available to the public.

### Kits

[0397] The compounds and compositions described herein can be packaged as a kit, which may optionally include instructions for using the compounds or compositions in various exemplary applications. Non-limiting examples include kits that contain, e.g., the compounds or compositions in a powder or lyophilized form, and instructions for using, including reconstituting, dosage information, and storage information for use in the subject methods. Kits may optionally contain containers of the compounds or compositions in a liquid form ready for use, or requiring further mixing with solutions for administration.

[0398] Aspects of the present disclosure include a kit comprising a first container comprising a composition including a subject target molecule comprising a thiol of formula (III), and a biomolecule comprising a phenol moiety of formula (I); and a second container comprising an enzyme capable of oxidizing the phenol or catechol moiety. In certain cases, the enzyme is a tyrosinase enzyme.

[0399] In certain embodiments, the subject kit includes a first container comprising a subject target molecule comprising a thiol of formula (III); a second container comprising a biomolecule comprising a phenol moiety or a catechol moiety of formula (I); and a third container comprising an enzyme capable of oxidizing the phenol or catechol moiety. In certain cases, the enzyme is a tyrosinase enzyme.

[0400] The kit can include optional components that aid in the subject methods, such as vials for reconstituting powder forms, etc. The kits may be supplied in either a container which is provided with a seal which is suitable for single or multiple puncturing with a hypodermic needle (e.g. a crimped-on septum seal closure) while maintaining sterile integrity. The kit components may be assembled in cartons, blister packs, bottles, tubes, and the like.

[0401] In addition to the above components, the subject kits may further include instructions for practicing the subject methods. These instructions may be present in the subject kits in a variety of forms, one or more of which may be present in the kit. One form in which these instructions may be present is as printed information on a suitable medium or substrate, e.g., a piece or pieces of paper on which the information is printed, in the packaging of the kit, in a package insert, etc. Another means would be a computer readable medium, e.g., CD, DVD, Blu-Ray, computer-readable memory (e.g., flash memory), etc., on which the information has been recorded or stored. Yet another means that may be present is a website address, e.g., such as a link to a website for downloading a suitable smart phone app for use in detecting the functional dye, which may be used via the Internet to access the information at a removed site. Any convenient means may be present in the kits.

### Utility

[0402] Subject compounds, compositions, kits, and subject modification methods, are useful in a variety of applications, including research applications and diagnostic applications.

[0403] Research applications of interest include any application where the selective manipulation of a target molecules, biomolecules, cells, particles and surfaces is of interest, including the manipulation, tagging and tracking of biomolecules (e.g., proteins) in vitro.

[0404] The subject methods and compositions also find use in therapeutic applications, e.g., therapeutic applications of interest include applications where antibody-drug conjugates (ADC) find use (e.g., novel immunotherapies), delivery of proteins for gene therapy, vaccine development.

### Methods of Screening Tyrosinase Variants

[0405] The present disclosure provides a method of identifying a tyrosinase variant that has a preference for a particular substrate. The method can provide for identification of a tyrosinase variant that has a preference for a phenol or a catechol that is present in a particular sequence, in a negatively-charged environment, or in a positively-charged environment. The method generally involves: a) contacting a peptide with a test tyrosinase and thiol-modified biotin (biotin-thiol), wherein the peptide has a length of from about 4 amino acids to about 25 amino acids (e.g., about 4, 5, 6, 7, 8, 9, 10, 11, 12, 13, 14, 15 to 20, or 20 to 25, amino acids) and where the peptide has a C-terminal Tyr residue, to generate a biotin-peptide conjugate; b) contacting the biotin-peptide conjugate with a streptavidin-conjugated bead (e.g., streptavidin conjugated to a magnetic bead), generating a streptavidin-biotin-peptide complex; and c) determine the amino acid sequence of the peptide in the streptavidin-biotin-peptide complex. In some cases, the method further comprises the step of washing the streptavidin-biotin-peptide complex to remove unbound peptides (peptides not conjugated to the biotin. In some cases, the method further comprises the step of releasing the peptide from the streptavidin-biotin-peptide complex before determining the amino acid sequence of the peptide. The peptide can be released (eluted) from streptavidin-biotin-peptide complex by incubating the streptavidin-biotin-peptide complex in a mixture comprising excess free biotin, acetonitrile, and formic acid (e.g., 80% acetonitrile, 5% formic acid, and 2 mM biotin). The amino acid sequence of the peptide present in the streptavidin-biotin-peptide complex (e.g., the eluted peptide) can be determined using any of a variety of well-known methods including, e.g., mass spectrometry (MS) (e.g., tandem MS). A library of peptides can be used to determine whether a test tyrosinase has a preference for a particular amino acid sequence, for a negatively charged environment, or for a positively charged environment.

### Examples of Non-Limiting Aspects of the Disclosure

### ASPECTS A

[0406] Aspects, including embodiments, of the present subject matter described above may be beneficial alone or in combination, with one or more other aspects or embodiments. Without limiting the foregoing description, certain non-limiting aspects of the disclosure numbered 1-39 are provided below. As will be apparent to those of skill in the art upon reading this disclosure, each of the individually numbered aspects may be used or combined with any of the preceding or following individually numbered aspects. This is intended to provide support for all such combinations of aspects and is not limited to combinations of aspects explicitly provided below:

[0407] Aspect 1. A method for chemoselective modification of a target molecule, the method comprising: contacting a target molecule comprising a thiol moiety with a biomolecule comprising a reactive moiety; wherein the biomolecule comprising the reactive moiety is generated by reaction of a biomolecule comprising a phenol moiety or a catechol moiety with an enzyme capable of oxidizing the phenol or catechol moiety; and wherein said contacting is under conditions sufficient for conjugation of the target molecule to the biomolecule, thereby producing a modified target molecule.

[0408] Aspect 2. The method of aspect 1, wherein the target molecule is a polypeptide.

[0409] Aspect 3. The method of aspect 1 or 2, wherein the enzyme is a tyrosinase enzyme.

[0410] Aspect 4. The method of any one of aspects 1 to 3, wherein the enzyme is bound to a solid support.

[0411] Aspect 5. The method of any one of aspects 1 to 4, wherein the phenol moiety is present in a tyrosine residue.

[0412] Aspect 6. The method of any one of aspects 1 to 5, wherein the thiol moiety is present in a cysteine residue.

[0413] Aspect 7. The method of aspect 6, wherein the cysteine residue is a native cysteine residue.

[0414] Aspect 8 The method of any one of aspects 1 to 7, wherein the biomolecule comprises one or more moieties selected from a fluorophore, an active small molecule, an affinity tag, and a metal-chelating agent.

[0415] Aspect 9. The method of any one of aspects 1 to 8, wherein the reactive moiety is an orthoquinone or a semi-quinone radical, or a combination thereof.

[0416] Aspect 10. The method of any one of aspects 1 to 9, wherein the biomolecule is a polypeptide.

[0417] Aspect 11. The method of aspect 10, wherein the biomolecule is a polypeptide selected from a fluorescent protein, an antibody, an enzyme, a ligand for a receptor, and a receptor.

[0418] Aspect 12. The method of any one of aspects 1 to 11, wherein the biomolecule comprising a phenol moiety or a catechol moiety is of formula (I), and wherein the biomolecule comprising a reactive moiety is of formula (II) or (IIA), or a combination thereof:

[chemical structure]

[0419] wherein:
[0420] Y¹ is a biomolecule, optionally comprising one or more moieties selected from, an active small molecule, an affinity tag, a fluorophore, and a metal-chelating agent;
[0421] X¹ is selected from hydrogen and hydroxyl; and
[0422] L is an optional linker.

[0423] Aspect 13. The method of any one of aspects 1 to 12, wherein the target molecule comprising a thiol moiety is of formula (III), and wherein the modified target molecule is of formula (IV), or (IVA), or a combination thereof:

[chemical structure]

[0424] wherein:
[0425] Y¹ is a biomolecule, optionally comprising one or more moieties selected from, an active small molecule, an affinity tag, a fluorophore, and a metal-chelating agent;
[0426] Y² is a second biomolecule;
[0427] L is an optional linker; and
[0428] n is an integer from 1 to 3.

[0429] Aspect 14. The method of aspect 13, wherein the modified target molecule of formula (IV) is of any of formulae (IV1)—(IV3):

[chemical structure]

[0430] the modified target molecule of formula (IVA) is of any of formulae (IVA1)-(IVA3):

[chemical structure]

[0431] Aspect 15. The method of aspect 13, wherein the modified target molecule of formula (IV) is of any of formulae (IV5)—(IV6):

[chemical structure]

and the modified target molecule of formula (IVA) is of any of formulae (IVA4)-(IVA5):

[chemical structure]

[0432] Aspect 16. The method of any one of aspects 1-15, wherein the biomolecule comprising a phenol moiety or a catechol moiety is described by the formula (IA):

[chemical structure]

[0433] wherein:
[0434] Y¹ is a biomolecule optionally comprising one or more groups selected from, an active small molecule, an affinity tag, a fluorophore, and a metal-chelating agent;
[0435] each R¹ is independently selected from hydrogen, acyl, substituted acyl, alkyl, and substituted alkyl;
[0436] X¹ is selected from hydrogen and hydroxyl; and
[0437] L¹ is a linker selected from a straight or branched alkyl, a straight or branched substituted alkyl, a polyethylene glycol (PEG), a substituted PEG, and one or more peptides.

[0438] Aspect 17. The method of aspect 16, wherein the fluorophore is a rhodamine dye or a xanthene dye.

[0439] Aspect 18. The method of any one of aspects 1 to 17, wherein the modified target molecule is described by the formula (IVB) or (IVC), or a combination thereof:

[chemical structure]

[0440] wherein:
[0441] Y¹ is a biomolecule optionally comprising one or more groups selected from, an active small molecule, an affinity tag, a fluorophore, and a metal-chelating agent;
[0442] each R¹ is independently selected from hydrogen, acyl, substituted acyl, alkyl, and substituted alkyl;
[0443] Y² is a second biomolecule;
[0444] L¹ is a linker selected from a straight or branched alkyl, a straight or branched substituted alkyl, a polyethylene glycol (PEG), a substituted PEG, and one or more peptides; and
[0445] n is an integer from 1 to 3.

[0446] Aspect 19. The method of aspect 18, wherein the modified target molecule of formula (IVB) is of any of formulae (IVB1)—(IVZB3):

[chemical structure]

and the modified target molecule of formula (IVC) is of any of formulae (IVC1)—(IVC3):

[chemical structure]

[0447] Aspect 20. The method of aspect 18, wherein the modified target molecule of formula (IVB) is of any of formulae (IVB5)—(IVB6):

[chemical structure]

and the modified target molecule of formula (IVC) is of any of formulae (IVC4)—(IVC5):

[chemical structure]

[0448] Aspect 21. The method of any one of aspects 1 to 20, wherein the method is conducted at a pH from 4 to 9.

[0449] Aspect 22. The method of aspect 21, wherein the method is conducted at neutral pH.

[0450] Aspect 23. The method of any one of aspects 1 to 22, wherein the target molecule comprising a thiol group is a CRISPR-Cas effector polypeptide.

[0451] Aspect 24. A composition, comprising:
[0452] a target molecule comprising a thiol of formula (III):

[chemical structure]

and
[0453] a biomolecule comprising a phenol moiety or a catechol moiety of formula (I):

[chemical structure]

[0454] wherein:
[0455] Y¹ is a biomolecule, optionally comprising one or more moieties selected from, an active small molecule, an affinity tag, a fluorophore, and a metal-chelating agent;
[0456] X¹ is selected from hydrogen and hydroxyl;
[0457] L is an optional linker; and
[0458] Y² is a second biomolecule.

[0459] Aspect 25. The composition of aspect 24, wherein Y² is a CRISPR-Cas effector polypeptide.

[0460] Aspect 26. The composition of aspect 24 or 25, wherein formula (I) is described by the formula (IA):

[chemical structure]

[0461] wherein:
[0462] Y¹ is a biomolecule optionally comprising one or more groups selected from, an active small molecule, an affinity tag, a fluorophore, and a metal-chelating agent;
[0463] each R¹ is independently selected from hydrogen, acyl, substituted acyl, alkyl, and substituted alkyl;
[0464] X¹ is selected from hydrogen and hydroxyl; and L¹ is a linker selected from a straight or branched alkyl, a straight or branched substituted alkyl, a polyethylene glycol (PEG), a substituted PEG, and one or more peptides.

[0465] Aspect 27. A kit comprising:
[0466] a first container comprising a composition of any one of aspects 24 to 26; and
[0467] a second container comprising an enzyme capable of oxidizing the phenol or catechol moiety.

[0468] Aspect 28. The kit of claim 27, wherein the enzyme is a tyrosinase enzyme.

[0469] Aspect 29. A compound, of formula (IV) or (IVA):

[chemical structure]

[0470] wherein:
[0471] Y¹ is a biomolecule, optionally comprising one or more moieties selected from, an active small molecule, an affinity tag, a fluorophore, and a metal-chelating agent;
[0472] L is an optional linker;
[0473] Y² is a second biomolecule; and
[0474] n is an integer from 1 to 3.

[0475] Aspect 30. The compound of aspect 29, wherein the modified target molecule of formula (IV) is of any of formulae (IV1)—(IV5):

[chemical structure]

[0476] Aspect 31. The compound of aspect 29, wherein the modified target molecule of formula (IVA) is of any of formulae (IVA1)-(IVA5):

[chemical structure]

[0477] Aspect 32. The compound of any one of aspects 29 to 31, wherein L is a cleavable linker.

[0478] Aspect 33. The compound of any one of aspects 29 to 32, wherein Y¹ is a polypeptide.

[0479] Aspect 34. The compound of aspect 33, wherein Y¹ is selected from a fluorescent protein, an antibody, and an enzyme.

[0480] Aspect 35. The compound of any one of aspects 29 to 34, described by the formula (IVB) or (IVC):

[chemical structure]

[0481] wherein:
[0482] Y¹ is a biomolecule optionally comprising one or more groups selected from, an active small molecule, an affinity tag, a fluorophore, and a metal-chelating agent;
[0483] each R¹ is independently selected from hydrogen, acyl, substituted acyl, alkyl, and substituted alkyl;
[0484] Y² is a second biomolecule;
[0485] L¹ is a linker selected from a straight or branched alkyl, a straight or branched substituted alkyl, a polyethylene glycol (PEG), a substituted PEG, and one or more peptides; and
[0486] n is an integer from 1 to 3.

[0487] Aspect 36. The compound of aspect 35, wherein the modified target molecule of formula (IVB) is of any of formulae (IVB1)—(IVZB5):

[chemical structure]

[0488] Aspect 37. The compound of aspect 35, wherein the modified target molecule of formula (IV) is of any one of formulae (IVC1)—(IVC5):

[chemical structure]

[0489] Aspect 38. The compound of any one of aspects 29 to 37, described by any of formula (IVD)-(IVG):

[chemical structure]

[0490] wherein:
[0491] R² is selected from alkyl, and substituted alkyl;
[0492] R³ is selected from, hydrogen, alkyl substituted alkyl, a peptide, and a polypeptide; and
[0493] n is an integer from 1 to 3.

[0494] Aspect 39. The compound of any one of aspects 29 to 38, wherein Y² is a CRISPR-Cas effector polypeptide.

### ASPECTS B

[0495] Aspects, including embodiments, of the present subject matter described above may be beneficial alone or in combination, with one or more other aspects or embodiments. Without limiting the foregoing description, certain non-limiting aspects of the disclosure numbered 1-71 are provided below. As will be apparent to those of skill in the art upon reading this disclosure, each of the individually numbered aspects may be used or combined with any of the preceding or following individually numbered aspects. This is intended to provide support for all such combinations of aspects and is not limited to combinations of aspects explicitly provided below:

[0496] Aspect 1. A method for chemoselective modification of a target molecule, the method comprising: contacting a target molecule comprising a thiol moiety with a biomolecule comprising a reactive moiety; wherein the biomolecule comprising the reactive moiety is generated by reaction of a biomolecule comprising a phenol moiety or a catechol moiety with an enzyme capable of oxidizing the phenol or catechol moiety; and wherein said contacting is under conditions sufficient for conjugation of the target molecule to the biomolecule, thereby producing a modified target molecule.

[0497] Aspect 2. The method of aspect 1, wherein the target molecule is a polypeptide or a polynucleotide.

[0498] Aspect 3. The method of aspect 1 or aspect 2, wherein the enzyme is a tyrosinase polypeptide.

[0499] Aspect 4. The method of any one of aspects 1-3, wherein the tyrosinase polypeptide is an Agricus bisporus tyrosinase (abTYR) polypeptide.

[0500] Aspect 5. The method of any one of aspects 1-3, wherein the tyrosinase polypeptide comprises an amino acid sequence having at least 75% amino acid sequence identity to the abTYR amino acid sequence depicted in FIG. 8 or FIG. 9.

[0501] Aspect 6. The method of aspect 4 or aspect 5, wherein the biomolecule comprising the phenol moiety or the catechol moiety is neutral or positively charged within 50 Angstroms (Å) of the phenol or catechol moiety.

[0502] Aspect 7. The method of any one of aspects 1-3, wherein the tyrosinase polypeptide is a Bacillus megaterium tyrosinase (bmTYR) polypeptide.

[0503] Aspect 8. The method of any one of aspects 1-3, wherein the tyrosinase polypeptide comprises an amino acid sequence having at least 75% amino acid sequence identity to any one of the amino acid sequences depicted in any one of FIGS. 10A-10Z and 10AA-10VV.

[0504] Aspect 9. The method of aspect 7 or aspect 8, wherein the biomolecule comprising a phenol moiety or a catechol moiety is negatively charged within 50 Å of the phenol or catechol moiety.

[0505] Aspect 10. The method of any one of aspects 1-9, wherein the target molecule is a polynucleotide.

[0506] Aspect 11. The method of aspect 10, wherein the target molecule is a DNA molecule.

[0507] Aspect 12. The method of aspect 10, wherein the target molecule is an RNA molecule.

[0508] Aspect 13. The method of any one of aspects 10-12, wherein the biomolecule is a polypeptide.

[0509] Aspect 14. The method of any one of aspects 1 to 13, wherein the enzyme is bound to a solid support.

[0510] Aspect 15. The method of any one of aspects 1 to 14, wherein the phenol moiety is present in a tyrosine residue.

[0511] Aspect 16. The method of any one of aspects 1 to 15, wherein the thiol moiety is present in a cysteine residue.

[0512] Aspect 17. The method of aspect 16, wherein the cysteine residue is a native cysteine residue.

[0513] Aspect 18. The method of any one of aspects 1 to 17, wherein the biomolecule comprises one or more moieties selected from a fluorophore, an active small molecule, an affinity tag, and a metal-chelating agent.

[0514] Aspect 19. The method of any one of aspects 1 to 18, wherein the reactive moiety is an orthoquinone or a semi-quinone radical, or a combination thereof.

[0515] Aspect 20. The method of any one of aspects 1 to 19, wherein the biomolecule is a polypeptide.

[0516] Aspect 21. The method of aspect 20, wherein the biomolecule is a polypeptide selected from a fluorescent protein, an antibody, an enzyme, a ligand for a receptor, and a receptor.

[0517] Aspect 22. The method of any one of aspects 1 to 21, wherein the biomolecule comprising a phenol moiety or a catechol moiety is of formula (I), and wherein the biomolecule comprising a reactive moiety is of formula (II) or (IIA), or a combination thereof:

[chemical structure]

[0518] wherein:
[0519] Y¹ is a biomolecule, optionally comprising one or more moieties selected from, an active small molecule, an affinity tag, a fluorophore, and a metal-chelating agent;
[0520] X¹ is selected from hydrogen and hydroxyl; and
[0521] L is an optional linker.

[0522] Aspect 23. The method of any one of aspects 1 to 22, wherein the target molecule comprising a thiol moiety is of formula (III), and wherein the modified target molecule is of formula (IV), or (IVA), or a combination thereof:

[chemical structure]

[0523] wherein:
[0524] Y¹ is a biomolecule, optionally comprising one or more moieties selected from, an active small molecule, an affinity tag, a fluorophore, and a metal-chelating agent;
[0525] Y² is a second biomolecule;
[0526] L is an optional linker; and
[0527] n is an integer from 1 to 3.

[0528] Aspect 24. The method of aspect 23, wherein the modified target molecule of formula (IV) is of any of formulae (IV1)—(IV3):

[chemical structure]

and the modified target molecule of formula (IVA) is of any of formulae (IVA1)-(IVA3):

[chemical structure]

[0529] Aspect 25. The method of aspect 23, wherein the modified target molecule of formula (IV) is of any of formulae (IV5)—(IV6):

[chemical structure]

[0530] the modified target molecule of formula (IVA) is of any of formulae (IVA4)-(IVA5):

[chemical structure]

[0531] Aspect 26. The method of any one of aspects 1 to 25, wherein the biomolecule comprising a phenol moiety or a catechol moiety is described by the formula (IA):

[chemical structure]

[0532] wherein:
[0533] Y¹ is a biomolecule optionally comprising one or more groups selected from, an active small molecule, an affinity tag, a fluorophore, and a metal-chelating agent;
[0534] each R¹ is independently selected from hydrogen, acyl, substituted acyl, alkyl, and substituted alkyl;
[0535] X¹ is selected from hydrogen and hydroxyl; and
[0536] L¹ is a linker selected from a straight or branched alkyl, a straight or branched substituted alkyl, a polyethylene glycol (PEG), a substituted PEG, and one or more peptides.

[0537] Aspect 27. The method of aspect 26, wherein the fluorophore is a rhodamine dye or a xanthene dye.

[0538] Aspect 28. The method of any one of aspects 1 to 27, wherein the modified target molecule is described by the formula (IVB) or (IVC), or a combination thereof:

[chemical structure]

[0539] wherein:
[0540] Y¹ is a biomolecule optionally comprising one or more groups selected from, an active small molecule, an affinity tag, a fluorophore, and a metal-chelating agent;
[0541] each R¹ is independently selected from hydrogen, acyl, substituted acyl, alkyl, and substituted alkyl;
[0542] Y² is a second biomolecule;
[0543] L¹ is a linker selected from a straight or branched alkyl, a straight or branched substituted alkyl, a polyethylene glycol (PEG), a substituted PEG, and one or more peptides; and
[0544] n is an integer from 1 to 3.

[0545] Aspect 29. The method of aspect 28, wherein the modified target molecule of formula (IVB) is of any of formulae (IVB1)—(IVZB3):

[chemical structure]

and the modified target molecule of formula (IVC) is of any of formulae (IVC1)—(IVC3):

[chemical structure]

[0546] Aspect 30. The method of aspect 28, wherein the modified target molecule of formula (IVB) is of any of formulae (IVB5)—(IVB6):

[chemical structure]

and the modified target molecule of formula (IVC) is of any of formulae (IVC4)—(IVC5):

[chemical structure]

[0547] Aspect 31. The method of any one of aspects 1 to 30, wherein the method is conducted at a pH from 4 to 9.

[0548] Aspect 32. The method of aspect 31, wherein the method is conducted at neutral pH.

[0549] Aspect 33. The method of any one of aspects 1 to 32, wherein the target molecule comprising a thiol group is a CRISPR-Cas effector polypeptide.

[0550] Aspect 34. A composition, comprising:
[0551] a target molecule comprising a thiol of formula (III):

[chemical structure]

[0552] a biomolecule comprising a phenol moiety or a catechol moiety of formula (I):

[chemical structure]

[0553] wherein:
[0554] Y¹ is a biomolecule, optionally comprising one or more moieties selected from, an active small molecule, an affinity tag, a fluorophore, and a metal-chelating agent;
[0555] X¹ is selected from hydrogen and hydroxyl;
[0556] L is an optional linker; and
[0557] Y² is a second biomolecule.

[0558] Aspect 35. The composition of aspect 34, wherein the biomolecule comprising a phenol moiety or a catechol moiety is neutral or positively charged within 50 Å of the phenol moiety or catechol moiety.

[0559] Aspect 36. The composition of aspect 34, wherein the biomolecule comprising a phenol moiety or a catechol moiety is negatively charged within 50 Å of the phenol moiety or catechol moiety.

[0560] Aspect 37. The composition of any one of aspects 34-36, wherein the Y¹ is a polypeptide and wherein Y² is a polypeptide.

[0561] Aspect 38. The composition of any one of aspects 34-36, wherein Y¹ is a polynucleotide and wherein Y² is a polypeptide.

[0562] Aspect 39. The composition of any one of aspects 34 to 38, wherein Y² is a CRISPR-Cas effector polypeptide.

[0563] Aspect 40. The composition of any one of aspects 34 to 39, wherein formula (I) is described by the formula (IA):

[chemical structure]

[0564] wherein:
[0565] Y¹ is a biomolecule optionally comprising one or more groups selected from, an active small molecule, an affinity tag, a fluorophore, and a metal-chelating agent;
[0566] each R¹ is independently selected from hydrogen, acyl, substituted acyl, alkyl, and substituted alkyl;
[0567] X¹ is selected from hydrogen and hydroxyl; and
[0568] L¹ is a linker selected from a straight or branched alkyl, a straight or branched substituted alkyl, a polyethylene glycol (PEG), a substituted PEG, and one or more peptides.

[0569] Aspect 41. A kit comprising:
[0570] a first container comprising a composition of any one of aspects 34 to 40; and
[0571] a second container comprising an enzyme capable of oxidizing the phenol or catechol moiety.

[0572] Aspect 42. The kit of aspect 41, wherein the enzyme is a tyrosinase polypeptide.

[0573] Aspect 43. The kit of aspect 42, wherein the tyrosinase enzyme is an Agricus bisporus tyrosinase enzyme (abTYR).

[0574] Aspect 44. The kit of aspect 42, wherein the tyrosinase polypeptide comprises an amino acid sequence having at least 75% amino acid sequence identity to the abTYR amino acid sequence depicted in FIG. 8 or FIG. 9.

[0575] Aspect 45. The kit of aspect 42, wherein the tyrosinase enzyme is a Bacillus megaterium tyrosinase enzyme (bmTYR).

[0576] Aspect 46. The kit of aspect 42, wherein the tyrosinase polypeptide comprises an amino acid sequence having at least 75% amino acid sequence identity to any one of the amino acid sequences depicted in any one of FIGS. 10A-10Z and 10AA-10VV.

[0577] Aspect 47. A compound, of formula (IV) or (IVA):

[chemical structure]

[0578] wherein:
[0579] Y¹ is a biomolecule, optionally comprising one or more moieties selected from, an active small molecule, an affinity tag, a fluorophore, and a metal-chelating agent;
[0580] L is an optional linker;
[0581] Y² is a second biomolecule; and
[0582] n is an integer from 1 to 3.

[0583] Aspect 48. The compound of aspect 47, wherein the modified target molecule of formula (IV) is of any of formulae (IV1)—(IV5):

[chemical structure]

[0584] Aspect 49. The compound of aspect 47, wherein the modified target molecule of formula (IVA) is of any of formulae (IVA1)-(IVA5):

[chemical structure]

[0585] Aspect 50. The compound of any one of aspects 47 to 49, wherein L is a cleavable linker.

[0586] Aspect 51. The compound of any one of aspects 47 to 50, wherein Y¹ is a polypeptide.

[0587] Aspect 52. The compound of aspect 51, wherein Y¹ is selected from a fluorescent protein, an antibody, and an enzyme.

[0588] Aspect 53. The compound of any one of aspects 47 to 52, described by the formula (IVB) or (IVC):

[chemical structure]

[0589] wherein:
[0590] Y¹ is a biomolecule optionally comprising one or more groups selected from, an active small molecule, an affinity tag, a fluorophore, and a metal-chelating agent;
[0591] each R¹ is independently selected from hydrogen, acyl, substituted acyl, alkyl, and substituted alkyl;
[0592] Y² is a second biomolecule;
[0593] L¹ is a linker selected from a straight or branched alkyl, a straight or branched substituted alkyl, a polyethylene glycol (PEG), a substituted PEG, and one or more peptides; and
[0594] n is an integer from 1 to 3.

[0595] Aspect 54. The compound of aspect 53, wherein the modified target molecule of formula (IVB) is of any of formulae (IVB1)—(IVZB5):

[chemical structure]

[0596] Aspect 55. The compound of aspect 53, wherein the modified target molecule of formula (IV) is of any one of formulae (IVC1)—(IVC5):

[chemical structure]

[0597] Aspect 56. The compound of any one of aspects 47 to 55, described by any of formula (IVD)-(IVG):

[chemical structure]

[0598] wherein:
[0599] R² is selected from alkyl, and substituted alkyl;
[0600] R³ is selected from, hydrogen, alkyl substituted alkyl, a peptide, and a polypeptide; and
[0601] n is an integer from 1 to 3.

[0602] Aspect 57. The compound of any one of aspects 47 to 56, wherein Y² is a CRISPR-Cas effector polypeptide.

[0603] Aspect 58. A method for chemoselective coupling of a first polypeptide and a second polypeptide to a coupling polypeptide, the method comprising:
[0604] a) contacting the first polypeptide with the coupling polypeptide, to generate a first polypeptide-coupling polypeptide conjugate,
[0605] wherein the first polypeptide comprises a thiol moiety,
[0606] wherein the coupling polypeptide comprises an N-terminal reactive moiety that forms a covalent bond with the thiol moiety present in the first polypeptide,
[0607] wherein the coupling polypeptide comprising the N-terminal reactive moiety is generated by reaction of a polypeptide comprising an N-terminal phenol or catechol moiety and a C-terminal phenol or catechol moiety with a first enzyme capable of oxidizing the N-terminal phenol or catechol moiety, but not the C-terminal phenol or catechol moiety, to generate the N-terminal reactive moiety;
[0608] wherein the coupling polypeptide comprises two or more positively charged or neutral amino acids within ten amino acids of the N-terminal phenol or catechol moiety and two or more negatively charged amino acids within ten amino acids of the C-terminal phenol or catechol moiety; and
[0609] b) contacting the second polypeptide with the first polypeptide-coupling polypeptide conjugate,
[0610] wherein the second polypeptide comprises a thiol moiety,
[0611] wherein the first polypeptide-coupling polypeptide conjugate comprises a C-terminal reactive moiety that forms a covalent bond with the thiol moiety present in the second polypeptide,
[0612] wherein the first polypeptide-coupling polypeptide conjugate comprising the C-terminal reactive moiety is generated by reaction of the first polypeptide-coupling polypeptide conjugate with a second enzyme capable of oxidizing the C-terminal phenol or catechol moiety to generate a C-terminal reactive moiety; and
[0613] wherein said contacting generates a first polypeptide-coupling polypeptide-second polypeptide conjugate.

[0614] Aspect 59. The method of aspect 58, wherein:
[0615] a) the first enzyme is a tyrosinase polypeptide comprising an amino acid sequence having at least 75% amino acid sequence identity to the abTYR amino acid sequence depicted in FIG. 8 or FIG. 9; and
[0616] b) the second enzyme is a tyrosinase polypeptide comprising an amino acid sequence having at least 75% amino acid sequence identity to any one of the amino acid sequences depicted in any one of FIGS. 10A-10Z and 10AA-10VV.

[0617] Aspect 60. A method for chemoselective coupling of a first polypeptide and a second polypeptide to a coupling polypeptide, the method comprising:
[0618] a) contacting the first polypeptide with the coupling polypeptide, to generate a first polypeptide-coupling polypeptide conjugate,
[0619] wherein the first polypeptide comprises a thiol moiety,
[0620] wherein the coupling polypeptide comprises an N-terminal reactive moiety that forms a covalent bond with the thiol moiety present in the first polypeptide,
[0621] wherein the coupling polypeptide comprising the N-terminal reactive moiety is generated by reaction of a polypeptide comprising an N-terminal phenol or catechol moiety and a C-terminal phenol or catechol moiety with a first enzyme capable of oxidizing the N-terminal phenol or catechol moiety, but not the C-terminal phenol or catechol moiety, to generate the N-terminal reactive moiety;
[0622] wherein the coupling polypeptide comprises two or more negatively charged amino acids within ten amino acids of the N-terminal phenol or catechol moiety and two or more positively charged or neutral amino acids within ten amino acids of the C-terminal phenol or catechol moiety; and
[0623] b) contacting the second polypeptide with the first polypeptide-coupling polypeptide conjugate,
[0624] wherein the second polypeptide comprises a thiol moiety,
[0625] wherein the first polypeptide-coupling polypeptide conjugate comprises a C-terminal reactive moiety that forms a covalent bond with the thiol moiety present in the second polypeptide,
[0626] wherein the first polypeptide-coupling polypeptide conjugate comprising the C-terminal reactive moiety is generated by reaction of the first polypeptide-coupling polypeptide conjugate with a second enzyme capable of oxidizing the C-terminal phenol or catechol moiety to generate a C-terminal reactive moiety; and
[0627] wherein said contacting generates a first polypeptide-coupling polypeptide-second polypeptide conjugate.

[0628] Aspect 61. The method of aspect 60, wherein:
[0629] a) the first enzyme is a tyrosinase polypeptide comprising an amino acid sequence having at least 75% amino acid sequence identity to any one of the amino acid sequences depicted in any one of FIGS. 10A-10Z and 10AA-10VV; and
[0630] b) the second enzyme is a tyrosinase polypeptide comprising an amino acid sequence having at least 75% amino acid sequence identity to the abTYR amino acid sequence depicted in FIG. 8 or FIG. 9.

[0631] Aspect 62. A method of covalently linking a first polypeptide to a second polypeptide, the method comprising:
[0632] a) contacting the first polypeptide with an immobilized reactive moiety,
[0633] wherein the immobilized reactive moiety is generated by reaction of an immobilized phenol moiety or catechol moiety with a first enzyme, wherein the first enzyme is capable of oxidizing the immobilized phenol moiety or catechol moiety, thereby generating the immobilized reactive moiety,
[0634] wherein the first polypeptide comprises: i) a thiol moiety; and ii) a phenol moiety or a catechol moiety, wherein the first polypeptide comprises two or more negatively charged amino acids within ten amino acids of the phenol moiety or the catechol moiety,
[0635] wherein the immobilized reactive moiety forms a covalent bond with the thiol moiety present in the first polypeptide, thereby generating an immobilized first polypeptide;
[0636] b) contacting the immobilized first polypeptide with second enzyme, wherein the second enzyme is capable of oxidizing the phenol moiety or the catechol moiety present in the first polypeptide to generate an immobilized first polypeptide comprising a reactive moiety; and
[0637] c) contacting the immobilized first polypeptide comprising a reactive moiety with a second polypeptide,
[0638] wherein the second polypeptide comprises: i) a thiol moiety; and ii) a phenol moiety or a catechol moiety, wherein the second polypeptide comprises two or more neutral or positively charged within ten amino acids of the phenol moiety or the catechol moiety,
[0639] wherein the reactive moiety present in the immobilized first polypeptide forms a covalent bond with the thiol moiety present in the second polypeptide, thereby generating an immobilized conjugate comprising the first polypeptide covalently linked to the second polypeptide.

[0640] Aspect 63. The method of aspect 62, wherein the first enzyme is a tyrosinase polypeptide comprising an amino acid sequence having at least 75% amino acid sequence identity to any one of the amino acid sequences depicted in any one of FIG. 8, FIG. 9, FIGS. 10A-10Z, and 10AA-10VV.

[0641] Aspect 64. The method of aspect 62 or aspect 63, wherein the thiol moiety present in the first polypeptide is present in a Cys, and wherein the phenol moiety present in the first polypeptide is present in a Tyr residue.

[0642] Aspect 65. The method of aspect 64, wherein the Tyr residue is present in a stretch of amino acids comprising EEEY (SEQ ID NO: 953), EEEEY (SEQ ID NO: 955), DDDDY (SEQ ID NO: 965), or DDDDY (SEQ ID NO: 965).

[0643] Aspect 66. The method of any one of aspects 62-65, wherein the second enzyme is a tyrosinase polypeptide comprising an amino acid sequence having at least 75% amino acid sequence identity to any one of the amino acid sequences depicted in any one of FIGS. 10A-10Z and 10AA-10VV.

[0644] Aspect 67. The method of any one of aspects 62-66, further comprising:
[0645] c) contacting the immobilized conjugate with a third enzyme, wherein the third enzyme is capable of oxidizing the phenol moiety or the catechol moiety present in the second polypeptide to generate an immobilized conjugate comprising a reactive moiety; and
[0646] c) contacting the immobilized conjugate comprising a reactive moiety with a third polypeptide,
[0647] wherein the third polypeptide comprises: i) a thiol moiety; and ii) a phenol moiety or a catechol moiety, wherein the third polypeptide comprises two or more negatively charged within ten amino acids of the phenol moiety or the catechol moiety,
[0648] wherein the reactive moiety present in the immobilized conjugate forms a covalent bond with the thiol moiety present in the second polypeptide, thereby generating an immobilized conjugate comprising the third polypeptide covalently linked to the second polypeptide.

[0649] Aspect 68. The method of aspect 67, wherein the third enzyme is a tyrosinase polypeptide comprising an amino acid sequence having at least 75% amino acid sequence identity to the amino acid sequence depicted in FIG. 8 or FIG. 9.

[0650] Aspect 69. The method of aspect 67 or 68, wherein, between step (b) and step (c), the second enzyme is inactivated or removed.

[0651] Aspect 70. The method of any one of aspects 67-69, wherein the thiol moiety present in the second polypeptide is present in a Cys, and wherein the phenol moiety present in the second polypeptide is present in a Tyr residue.

[0652] Aspect 71. The method of aspect 70, wherein the Tyr residue is present in a stretch of amino acids comprising RRRY (SEQ ID NO: 949), RRRRY (SEQ ID NO: 951), KKKY (SEQ ID NO: 966), or KKKKY (SEQ ID NO: 967).

### EXAMPLES

[0653] The following examples are put forth so as to provide those of ordinary skill in the art with a complete disclosure and description of how to make and use the present invention, and are not intended to limit the scope of what the inventors regard as their invention nor are they intended to represent that the experiments below are all or the only experiments performed. Efforts have been made to ensure accuracy with respect to numbers used (e.g. amounts, temperature, etc.) but some experimental errors and deviations should be accounted for. Unless indicated otherwise, parts are parts by weight, molecular weight is weight average molecular weight, temperature is in degrees Celsius, and pressure is at or near atmospheric. Standard abbreviations may be used, e.g., bp, base pair(s); kb, kilobase(s); pl, picoliter(s); s or sec, second(s); min, minute(s); h or hr, hour(s); aa, amino acid(s); kb, kilobase(s); bp, base pair(s); nt, nucleotide(s); i.m., intramuscular(ly); i.p., intraperitoneal(ly); s.c., subcutaneous(ly); and the like.

[0654] Exemplary phenol and catechol containing intermediates may be synthesized using any convenient method. Methods which can be adapted for use in preparing exemplary phenol and catechol containing intermediates of this disclosure includes those methods described by Maza et al. in “Enzymatic Modification of N-Terminal Proline Residues Using Phenol Derivatives”, J. Am. Chem. Soc. (2019), 141, 3885-3892, the disclosure of which is herein incorporated by reference in its entirety. Many general references providing commonly known chemical synthetic schemes and conditions useful for synthesizing the disclosed compounds are also available (see, e.g., Smith and March, March's Advanced Organic Chemistry: Reactions, Mechanisms, and Structure, Fifth Edition, Wiley-Interscience, 2001; or Vogel, A Textbook of Practical Organic Chemistry, Including Qualitative Organic Analysis, Fourth Edition, New York: Longman, 1978). Reactions may be monitored by thin layer chromatography (TLC), LC/MS and reaction products characterized by LC/MS and ¹H NMR.

### Example 1

[0655] Unless otherwise specified all chemicals were purchased from Sigma Aldrich. Peptides were purchased from Genescript. Peptide sequences may be found in SI.

### Tyrosinase Coupling Reactions

[0656] MS2 conjugation was carried out on a cysteine mutant of the capsid which replaces the asparagine residue at position 87 with a cysteine (N87C). Coupling conditions were 20 mM pH 6.5 Phosphate, 10 uM N87C MS2, Tyrosinase purchased from Sigma-Aldrich (CAS number 9002-10-2), was diluted in 50 mM phosphate pH 6.5 was added at a 1:10 ratio to a final concentration of 0.16 μM. The coupling reagent unless otherwise noted was added to a final concentration of 50 μM or 5× MS2 monomer concentration. Ultra Pure water (Milipore Sigma, 18 uohm resistance) was added to a final volume of 20 L. Reactions were carried out for 30 minutes at room temperature before quenching with 2 μL 20 mM Tropolone and 20 mM TCEP, yielding a final concentration of 2 mM for each.

[0657] For stability studies, loose tyrosinase was replaced with enzyme coupled to resin. Reactions were carried out as above with the addition of a filtration step through 0.2 um filters to remove excess tyrosinase as well as quenching with 1 mM Tropolone and TCEP.

[0658] Cas9 coupling occurred under the following conditions: 20 mM Tris HCl, 300 mM KCl, 50 mM Trehalose pH 7.0 (Buffer A), 4° C. 1 hr. 10 uM Cas9. All samples were quenched with using the quenching solution as above, then solvent exchanged into Buffer A three times using a 100,000 kDa MWCO spin concentrator. For peptide coupling, peptides were added at a 5× ratio, yielding 50 uM peptide concentration. In protein-protein coupling it was found that a 1:1 ratio of Cas9: target protein yielded near-quantitative conversion to the singly modified Cas9 after filtration, while a 1:5 ratio of Cas9: target yielded full conversion to the doubly modified product.

[0659] FIG. 1 shows the scheme of the reaction on the protein scale.

[0660] FIG. 2, panel A shows that capping the thiols via a maleimide on the protein blocks addition via tyrosinase catalyzed reaction, and that the converse, where tyrosinase is performed first, also blocks the reaction of maleimide.

[0661] FIG. 2, panel B shows a series of stability studies, demonstrating that the conjugate linkage is stable over time in a variety of buffer conditions.

[0662] FIG. 3 shows a diverse array of substrates have been used in the subject methods.

[0663] FIG. 4 shows mass spectrum data supporting the addition of a variety of peptides using the subject methods.

[0664] FIG. 5, panel A demonstrates that Cas9 can be modified using the subject methods.

[0665] FIG. 5, panel B, demonstrates that the modified Cas9 retains activity, even if the reaction is performed on the apo protein, i.e., Cas9 without its guide RNA.

[0666] FIG. 5, panel C demonstrates that Cas9 can be modified with another protein, in this case GFP with an N-terminal Tyrosine.

[0667] FIG. 5, panel D demonstrates that the GFP-Cas9 conjugate retains activity.

[0668] FIG. 6 demonstrates that Cas9 modified with a peptide that is the 2NLS sequence Ac-YGPKKKRKVGGSPKKKRKV (SEQ ID NO:943), in which case a 20× improvement in editing in neural progenitor cells.

[0669] FIG. 7 illustrates ESI-TOF data showing modification of a phenol containing protein with small molecule thiols.

### Example 2

[0670] A system that takes advantage of the charge limitations of abTYR, while employing a semi-orthogonal tyrosinase from the bacteria Bacillus megaterium (bmTYR) (Goldfeder et al. (2013) Biochim. Biophys. Acta-Proteins Proteomics 1834:629; Kanteev et al. (2013) J. Biol. Inorg. Chem. 18:895; Kanteev et al. (2015) Protein Sci 24:1360; Sendovski et al. (2010) Acta Crystallogr. Sect. F Struct. Biol. Cryst. Commun. 66:1101; Shuster Ben-Yosef et al. (2010) Enzyme Microb. Technol. 47:372; Shuster et al. (2009) J. Mol. Microbiol. Biotechnol. 17:188) was developed.

[0671] To explore the effects of substrate charge on abTYR, a library of fifteen 5-mer peptides was obtained, and a charge screen of abTYR was conducted by comparing the yields of the coupling reaction between the peptide library and both Y182C GFP and pAF MS2. These substrates were chosen as they represent a single thiol in the case of Y182C GFP and a single aniline in the case of pAF MS2, as well as both a positive and negatively charged protein substrate. Based on the data, it appears that abTYR is sensitive to both charge and steric hinderance around the tyrosine residue, with negative charge being a much more detrimental factor than steric bulk. In both cases, a−4 charge was enough to completely inhibit tyrosinase activity on peptide (FIG. 11).

[0672] In order to explore the potential reasons behind abTYR's charge preferences, the protein's crystal structure was examined and it was noted that abTYR has a large overall negative charge around its active site, due to the abundance of glutamate and aspartate residues. It was hypothesized that these “gatekeeper” residues are what is causing the charge preferences of abTYR (FIG. 12 A).

[0673] Expressing eukaryotic enzymes in bacteria is nontrivial; in addition, abTYR is hetero-tetrameric which adds further complexity to its expression. A monomeric bacterial tyrosinase with a published crystal structure was identified. The tyrosinase from Bacillus megaterium (bmTYR) (Goldfeder et al. (2013) supra; Kanteev et al. (2013) supra; Kanteev et al. (2015) supra; Sendovski et al. (2010) supra; Shuster Ben-Yosef et al. (2010) supra; Shuster et al. (2009) supra) was studied. bmTYR has a positively charged active site, which confirmed by the crystal structure (FIG. 12B). bmTYR was expressed in E. coli and initial trials of the peptide charge screen were carried out. The data indicated that bmTYR can accept negatively charged substrates (FIG. 13, 14). Additionally, bmTYR is inhibited by tropolone similarly to abTYR. Expressing bmTYR mutants in order to increase catalytic activity can be carried out. Based on the literature the mutations: F197A, R209H, V218G, and V218F (Kanteev et al. (2015) supra; Sendovski et al. (2010) supra; Shuster Ben Yosef et al. (2010) supra; Shuster Ben-Yosef (2010) supra) give rise to some varied and beneficial properties including better retention of copper molecules, greater selectivity for phenolic targets, and both increased and decreased sensitivity to steric bulk. Additionally, bmTYR with the mutations D55K and E141K can be used, which should give rise to a tyrosinase which acts only on negatively charged substrates. These residues, D55 and E141 are located adjacent to the active site and are highlighted in red (FIG. 12 B).

### Example 3

### Results

[0674] In the course of initial studies on abTYR-mediated oxidative coupling of phenol-functionalized cargo, it was asked whether the N-terminal tyrosine residue on the α-endorphin peptide (FIG. 16 a) would be sterically accessible enough to reach into the abTYR active site. This reaction with p-Aminophenylalanine (pAF) MS2 viral capsid coupling partner was tested. Clean, near-quantitative conversion to the functionalized viral capsid was observed (FIG. 16 b). Acetylation of the α-endorphin N-terminus was essential to the success of the reaction, since the free N-terminus would readily attack the proximal o-quinone, as it does upon the oxidation of the free L-Tyrosine amino acid during melanin biosynthesis (Ramsden et al. (2014) Bioorganic Med. Chem. 22:2388).

[0675] To test the reaction on a challenging protein substrate, a GGY tag was chosen to be appended to the single chain variable fragment (scFv) of the Trastuzumab antibody. Trastuzumab is an FDA approved monoclonal antibody for the treatment of HER2+ breast cancer (Plosker et al. (2006) Drugs 66:449) and is widely used as a model construct for testing bioconjugation reactions (Chen et al. (2016) Sci. rep. 6:1; Zhang et al. (2015) Nat. Chem. 8:120; Ban et al. (2013) Bioconjug. Chem. 24:520; Bruins et al. (2017) Bioconjug. Chem. 28:1189). Trastuzumab is also commonly used in single chain variable fragment (scFv) format, which is of interest because of its improved tissue and tumor penetration relative to full length antibodies (Yokota et al. (1992) Cancer Res. 52:3402; Batra et al. (2002) 13:603) as well as its potential to be used for constructing bispecific antibodies (Brinkmann et al. (2017) MAbs 9:182). An established E. coli periplasmic expression protocol was chosen to produce the Trastuzumab scFv with a C-terminal -GGY tag (Rouet et al. (2012) Nat. Protoc. 7:364). One potential challenge presented by this substrate is that, of its 15 tyrosine residues, 8 are located on the antigen binding site with their phenol side chains oriented toward the bulk solution. Despite the potential for off target oxidation of the internal tyrosine residues, it was observed that the C-terminally -GGY tagged version of the scFv was near-quantitatively coupled to a model Aniline nucleophile (FIG. 16) while a non-tagged version is virtually untouched under the reaction conditions (FIG. 23).

[0676] The exceptionally clean conversion of this substrate led to the use of it as a model for testing several parameters of the reaction. While conducting these investigations, abTYR concentrations were measured in units of U/mL, as equal masses of different batches of abTYR were found vary somewhat in their enzymatic activity (e.g. 1 mg/mL tyrosinase stock solutions typically had activities of between 900 and 1200 U/mL, corresponding to 150 to 200 nM of enzyme in a typical 12 U/mL reaction). Varying the concentration of Aniline from 25 μM to 750 μM showed that maximum conversion was achieved at a concentration of 150 μM (FIG. 16 b) with at least 8 U/mL abTYR. However, at lower abTYR concentrations, higher concentrations of Aniline appeared to inhibit tyrosinase, as evidenced by residual un-oxidized starting material in these reactions (FIG. 24). To reduce inhibition of abTYR by the nucleophilic coupling partner, the concentration screen was repeated with o-Toluidine and 2,6-Dimethylaniline (FIG. 26, FIG. 17), which was hypothesized to not occlude the tyrosinase active site as readily. However, these nucleophiles provided lower conversion than Aniline at every concentration tested.

[0677] The fact that residual un-coupled protein was fully oxidized by TOF-LCMS in reactions with at least 8 U/mL tyrosinase suggests that the coupling partner has a limited time to intercept the o-quinone intermediate before it is quenched by a competing process. A late nucleophile addition experiment, in which Aniline was added to the a series of scFv-GGY OC reactions 5, 10, 20, 40, or 60 min after Tyrosinase, showed that while the starting protein is completely oxidized in every case, the amount of product formed depends upon how soon after the start of the reaction the coupling partner is added (FIG. 25).

[0678] Given the importance of the rate at which the nucleophile reacts with the o-quinone intermediate, what the optimal coupling partner might be between the 4-aminophenyl group and its cargo was investigated. 4-Aminophenyl-N-methylamide, p-Anisidine, and p-Toluidine were used as model compounds to probe the best means of attaching 4-Aminophenols to other substrates. 4-Aminophenyl-N-methylamide provided the cleanest reactions while p-Anisidine and p-Toluidine provided poor results. *p-Anisidine reaction turned orange, indicating oxidation of the nucleophile and secondary modification of the protein. Finally, the coupling efficiencies of various piperazines and a racemic N-methyl pyrrolidine were assessed. These proved to be inferior nucleophiles as much higher micromolar and millimolar concentrations were required to achieve good conversions (FIG. 16 c; FIG. 27). N-methyl-pyrrolidine—a model for a proline N-terminus—provided the best conversion in this category of nucleophiles.

[0679] To demonstrate that the abTYR-mediated modification of the -GGY tagged Trastuzumab scFv did not perturb the binding activity of this construct, the fluorescent dye Oregon Green (O.G.) 488 was derivatized with an Aniline nucleophile and oxidatively coupled onto the scFv. The reaction proceeded optimally with 25 μM Aniline-O.G. 488 with 12 U/mL abTYR to give the scFv-GGY-An-O.G. 488 construct with 85% conversion. Flow cytometry showed that this construct could recognize the HER2+SK-BR-3 breast cancer cell line selectively over HER2-MDA-MB-468 breast cancer cells (FIG. 22 d).

[0680] The product structure of the oxidative coupling reaction between p-aminophenylalanine and o-methoxyphenols and o-aminophenols mediated by sodium periodate and potassium ferricyanide (Obermeyer et al. (2014) Angew. Chemie-Int. Ed. 53:1057; Elsohly et al. (2017) J. Am. Chem. Soc. 139:3767) has been characterized previously and the product masses observed in the tyrosinase-mediated coupling are consistent with the expected structure. Nonetheless, the coupling product by NMR was characterized to confirm the equivalence of the reactions. A small-molecule model reaction was performed between N-Acetyl-L-Tyrosine and p-Toluidine in D₂O with abTYR. The reaction required more tyrosinase and an extended reaction time to proceed in D₂O and turned dark purple. Direct NMR observation of the reaction mixture revealed a single primary product consistent with that shown in the figures.

[0681] The stability of the aniline conjugate to the Tyr-tagged scFv was monitored at 4° C. over the course of 7 days in a standard phosphate and NaCl protein storage buffer with 15% glycerol (pH 7.4) and the linkage was found to be intact (FIG. 30). Addition of 10 mM dithiothreitol (FIG. 29) or glutathione (FIG. 31) resulted in the formation of thiol adducts. In the case of glutathione, this further modification occurred quantitatively within 24 hours. FIG. 32 shows sequential treatment of the aniline-coupled scFv with Glutathione then DTT. Despite this additional modification, in both cases the aniline linkage remained intact.

[0682] The methodology was also tested on diverse protein substrates by expressing several full-length proteins with tyrosine tags at the N or C termini.

[0683] Protein-L is an IgG binding protein that recognizes variable regions of human kappa light chains. Discovered in pathogenic Peptostreptococcus magnus, it consists of five binding domains (Donaldson et al. (2013) Proc. Natl. Acad. Sci. U.S.A. 110:17456) connected in tandem by short 9-10 amino acid linkers (Kastern et al. (1992) J. Biol. Chem. 267:12820) (FIG. 20 a). The avidity of the combined interactions of these five domains allows the protein to achieve a K_{d} of 130 nM at pH 8 (Beckingham et al. (1999) Biochem. J. 340:193). When expressed recombinantly, cell-wall anchoring domains of the wild type protein are typically omitted, and some truncated versions have only 3 or 4 light chain binding domains. Protein-L is routinely used for the purification of scFv's (Song et al. (2015) Protein Expr. Purif 116:98) and has been employed as a universal flow cytometry marker for cells expressing Chimeric Antigen Receptors (CARs) (Zheng et al. (2012) J. Transl. Med. 10:1) which typically utilize scFv's to recognize their targets. Because Protein-L binds to variable light chains without interfering with the antigen recognition loops, it can be used as a “secondary” detection reagent for bound scFv's as well as IgG's.

[0684] Protein-L was expressed in E. coli with pendent -GGY and -GGGGSGGY (SEQ ID NO: 968) tags for abTYR-mediated modification with aniline-functionalized O.G. 488 to create a secondary scFv detection reagent. However, these constructs were resistant to oxidation by abTYR, most likely because the terminal tyrosine residue does not extend far enough away from the bulk of the protein structure to reach into the sterically occluded abTYR active site. The same problem was encountered when short, -GGY and -SSGGGGY (SEQ ID NO: 948) tags were appended to the C-terminus of Maltose Binding Protein (MBP). In order to circumvent this problem, a collection of Protein-L variants with C-terminal linkers of various types and lengths preceding the tyrosine tag was generated (FIG. 20 b, FIG. 28). In addition to the flexible (G₄S)₁₃ linkers, Protein-L was extended with an alpha-helical (EAAAK)₂ (SEQ ID NO: 969)repeat sequence (Arai et al. (2001) Protein Eng. 14:529), a non-hydrogen bonding, rigid (AP)₃ repeat (Chen et al. (2013) Adv. Drug Deliv. Rev. 65:1357), a poly asparagine (N₂₀) sequence, and the C-terminal sequence of the easily-modified Trastuzumab scFv (EIKRTGGY) (SEQ ID NO: 970). Additionally, the C-terminal 5^{th} light chain binding domain was deleted and the native linker between the 4^{th} and 5′ light chain binding domains was extended with -GGY and -G₄SGGY (SEQ ID NO: 968) tags. Disappointingly, none of these variants could be oxidized by abTYR.

[0685] It was recognized that the steric bulk of the 120 kDa tyrosinase protein will likely make access to the active site difficult on many protein substrates. While in principle, it should be possible to generate an abTYR-oxidizable variant by continuing to extend the C-terminal linker, longer linkers increase the risk of the tag interfering with protein function, and are more difficult to install by PCR, reducing the convenience of the tyrosine tagging approach. Therefore, there was motivation to express and test the much smaller Bacillus megaterium Tyrosinase (bmTYR). This 35.5 kDa protein is robustly expressed in BL21 (DE3) E. coli with a yield of up to 200 mg/L and has a much more sterically exposed active site in comparison to abTYR. Gratifyingly, all tyrosine-tagged Protein-L variants exposed to bmTYR were quantitatively oxidized and reacted with 150 μM aniline with over 90% conversion while the non-tagged variant was untouched (FIG. 20 b, FIG. 28). Tyrosine-tagged MBP variants were successfully oxidized by bmTYR as well, though in this case, the reaction took more than 1 hour to reach high conversion.

[0686] With a solution to Protein-L modification in hand, the bmTYR mediated OC was performed with 25 μM of the Aniline-O.G. 488 nucleophile on the -AN₂₀GGY tagged Protein-L variant. The desired conjugate was obtained with 87% conversion (FIG. 22 c). This construct was then applied to HER2+(SK-BR-3) or HER2− (MDA-MB-468) breast cancer cells which had been pre-treated with the non-tyrosine tagged Trastuzumab scFv. Only the Protein-L construct that had been modified with Aniline-O.G. 488 under the bmTYR-mediated OC conditions was able to label HER2+ cells after exposure to the scFv (FIG. 22 d). Cells without HER2 or samples with a component omitted from the coupling and labeling workflow were untagged.

### Materials and Methods

### Reagents

[0687] All chemicals were ordered from Sigma Aldrich or ThermoFisher Scientific and used as received unless noted otherwise. Milli-Q H₂O was used.

[0688] Agaricus bisporus Tyrosinase (“Tyrosinase from Mushroom”) was obtained from Sigma Aldrich as a lyophilized powder and stored at −20° C. when received. 1 mg/mL stock solutions were prepared in 50 mM phosphate buffer, in 15% glycerol in water, pH 6.5, stored at −80° C. Aliquots were thawed on ice shortly before use and the activity of each new stock was assayed. A stability study has indicated that the activity of abTYR aliquots stored in this manner changes very little over months of storage at −80° C.

### Protein Constructs

[0689] Protein gene blocks were ordered from Integrated DNA Technologies, codon-optimized for E. coli expression. Bsa1 cut sites were present at either end of the gene sequence for cloning into the pET28b golden gate entry vector. This vector enabled green/white screening for colonies successfully transformed with plasmids bearing the inserted gene.

### Representative Tyrosinase-Mediated Oxidative Coupling Reaction for Subsequent TOF-LCMS Analysis

[0690] Volumes of each stock solution were added to an Eppendorf tube with the tyrosinase enzyme added last. The resulting solution was allowed to stand at room temperature for 60 minutes before adding 5.0 μL of a 21 mM aqueous solution of tropolone. The quenched reaction was subject to four cycles of spin desalting in a 10 kDa MWCO 500 μL amicon ultra centrifugal filter, diluting with 400 μL of Milli-Q H₂O before each cycle to remove aniline, and phosphate buffer. The resulting 35-50 μL droplet was passed through a 0.22 μm cellulose acetate centrifugal filter and submitted to TOF-LCMS analysis.

### Cytosolic Expression of Recombinant Proteins—Liter Scale

[0691] A 10 mL overnight culture of BL21 (DE3) Star E. coli in TB medium with 50 μg/mL kanamycin was inoculated into a 2.8 L trident Erlenmeyer flask with 1 L of sterile Terrific Broth medium and kanamycin. The cultures were grown at 37° C. with 220 rpm shaking until O.D. at 600 nm reached 0.6-0.8. To induce expression, IPTG was added from a 1.0 μM stock to a final concentration of 1.0 mM. The cultures were incubated at the temperature, time, and shaking speed given in the table above. The culture was pelleted via centrifugation (3,200 g, 15 min, 4° C.) and the supernatant was discarded. All steps from this point were performed with cold (4° C.) buffers and on ice. Each pellet was re-suspended in 45 mL of D.I. H₂O then pelleted in 50 mL falcon tubes (3,200 g, 15 min, 4° C.). The supernatant was poured off and the pellets were either stored at −80° C. or lysed immediately.

[0692] Each cell pellet (from 0.5 L culture) was re-suspended in 25 mL of lysis buffer (PBS, 20 mM imidazole, pH 7.4 with 0.1 mM Phenylmethylsulfonyl fluoride, 0.05 U/mL benzynase, and 0.5 mg/mL chicken egg white lysozyme). The cells were incubated on ice for at least 30 minutes then lysed by 10 min of sonication (2 sec on, 3 sec off pulses at 60% amplitude). The resulting suspension was centrifuged (14,000 g, 30 min, 4° C.) and the supernatant was passed through a 0.2 am syringe filter. The crude lysate was subject to NiNTA purification using a G.E. Healthcare HisTrap HP 5 mL affinity column equilibrated with Buffer A (PBS with 20 mM imidazole, pH 7.4). The protein was eluted using a gradient of 0-100% Buffer B (PBS with 400 mM imidazole, pH 7.4) over 20 column volumes. Product containing fractions were identified using SDS-PAGE and submitted to further purification as needed. Purified protein was exchanged into protein storage buffer (PBS with 15% glycerol) via 4 rounds of spin concentration in 10 kDa MWCO, 15 mL amicon ultra centrifugal filters, diluting with storage buffer before each spin.

### Cytosolic Expression of Recombinant Proteins—10-50 mL Scale

[0693] Expression and cell pellet processing were carried out as above.

[0694] Pellets were re-suspended in 1.0 mL of lysis buffer and sonicated for 45 sec (5 sec on, 5 sec off pulses at 50% amplitude). Lysates were centrifuged for 10 min at 16,100 g. Supernatant was retained and solids were discarded. For each lysate, 10 μL of HisPur NiNTA resin (Thermo Scientific Products #88221; capacity of 60 mg His₆-protein per mL suspended resin) per mL of cell culture was equilibrated with binding buffer (PBS, 20 mM Imidazole, pH 7.4). The resin was then suspended in the cell lysate and incubated at 4° C. for 1 hour. After binding, resin aliquots were washed 2× with binding buffer, then bound proteins were released with elution buffer (PBS, 80 mM Imidazole, pH 7.4). The purity of eluted proteins was assessed with SDS-PAGE and TOF-LCMS. Proteins were exchanged into protein storage buffer (20 mM Na₂HPO₄, 150 mM NaCl, in 15% glycerol, pH 7.4) via 4 cycles of centrifugation (14,000 g, 20 min, 4° C.) in 10 kDa MWCO 500 μL amicon ultra spin desalting filters, diluting to 500 μL with protein storage buffer before each cycle.

### Maltose Binding Protein (MBP)

[0695] After NiNTA purification, MBP-containing fractions were combined, concentrated to 20 mL in 10 kDa MWCO, 15 mL amicon ultra centrifugal filters then dialyzed into anion exchange Buffer A (25 mM TRIS-HCl, 20 mM NaCl, pH 7.9), then loaded onto a G.E. Healthcare HiTrap Q HP 5 mL column and eluted with a gradient of 0-100% Buffer B (25 mM TRIS-HCl, 500 mM NaCl, pH 7.9) over 20 column volumes.

Periplasmic Expression and Purification of Trastuzumab scFv

[0696] The following procedure was adapted from a protocol by Rouet et al. (2012), supra. Two finless 4 L Erlenmeyer flasks containing 1 L of sterile Terrific Broth medium with 50 μg/mL kanamycin each, were inoculated with 10 mL overnight TB medium cultures of BL21 (DE3) Star E. coli cells bearing the PelB—Trastuzumab scFv—GGY or wild type C-terminus gene construct in pET28b. The cultures were grown at 37° C. with 220 rpm shaking until O.D. at 600 nm reached 0.6-0.8. To induce expression, IPTG was added from a 1.0 μM stock to a final concentration of 0.4 mM. The cultures were then incubated at 28° C. with 200 rpm shaking. After 4 hours, each 1 L culture was divided into two centrifuge bottles and pelleted by centrifugation (3,200 g, 15 min, 4° C.) and the supernatant was discarded. All steps from this point were performed with cold (4° C.) buffers and on ice. Each pellet (from 0.5 L culture) was re-suspended in 25 mL of periplasmic extraction buffer 1 (20% w/v sucrose, 100 mM TRIS-HCl, 1.0 mM EDTA, pH 8.0) and incubated for 30 min. The cells were pelleted by centrifugation (10,000 g, 10 min, 4° C.) using a fixed-angle rotor, and the supernatant was poured off and saved as “periplasmic extract 1”. The pellets were each re-suspended in 25 mL of periplasmic extraction buffer 2 (5.0 mM MgCl₂) and incubated on ice for 30 min. The cells were again pelleted by centrifugation (10,000 g, 10 min, 4° C.) and the supernatant was poured off and saved as “periplasmic extract 2”. The periplasmic extracts were both found to contain scFv by SDS-PAGE. The extracts were combined, concentrated to 50 mL via multiple rounds of centrifugation in 10 kDa MWCO amicon ultra centrifugal filters (4000 g, 20 min, 4° C.), then passed through 0.22 μm PES syringe filters. The periplasmic extracts were transferred to 3500 Da MWCO dialysis cassettes and incubated in 4 L of PBS overnight with gentle stirring.

[0697] A 5 mL G.E. Healthcare Capto L (resin-bound Protein L) affinity column was equilibrated with Buffer A (50 mM citrate, 400 mM NaCl, pH 6.0). The dialyzed periplasmic extracts were again passed through a 0.22 μm PES syringe filter, loaded onto the Capto L column, and eluted with a gradient of 0-100% Buffer B (50 mM citrate, pH 2.5) over 22 column volumes. Fraction collection tubes were pre-filled with 1.0 mL of 1.0 μM TRIS HCl buffer at pH 8.0 to neutralize elution buffer. scFv typically eluted at 100% buffer B and was pure by TOF-LCMS. 0.8 mg to 1.2 mg per liter of expression media was obtained.

### Synthesis

[chemical structure]

[0698] 5.0 mg (9.8 μmole) of Oregon Green™ 488 carboxylic acid, succinimidyl ester, 5-isomer from ThermoFisher Scientific was dissolved in 200 μL of DMF. 29.1 μL of a solution of 45 μg/μL 4-(2-aminoethyl)aniline (1.34 mg, 9.8 μmol) in DMF and 52.8 μL of a solution of 60 μg/μL TEA (3.17 mg, 31.3 μmol) in DMF were added. The resulting bright red-orange solution was shielded from light, and allowed to stir at room temp for 18 hours. The reaction mixture was purified via semipreparatory HPLC using a gradient of 50-60% solvent B (ACN) in solvent A (Milli-Q H₂O) over 8 minutes. Product-containing fractions (green) were combined, partially concentrated via rotary evaporation to remove ACN, frozen at −80° C., and lyophilized while shielded from light. 2.418 mg (46%) of an orange powder was obtained. The product was dissolved to a stock concentration of 750 μM in 20% ACN in H₂O and used in coupling reactions without further characterization.

Cell Preparation for scFv Binding:

[0699] T-25 flasks with MDA-MB-468 (Her2-) cells or SK-BR-3 (Her2+) cells were obtained from the Berkeley Cell Culture Facility and grown to 90-100% confluency in a 37° C. incubator with 5% CO₂. In preparation for analysis, growth medium was removed and adherent cells were rinsed with D-PBS. Cells were detached by treatment with 0.25% Trypsin for 10-15 min at 37° C. Trypsin digestions were halted by the addition of Cell Binding Buffer (DPBS supplemented with 10% Fetal Bovine Serum (FBS) and 1.0% w/v NaN₃ to prevent the internalization of cell surface markers) to a total volume of 13-15 mL. Cells were added to 15 mL falcon tubes and subject to two cycles of centrifugation (300 g, 5 min, room temp.), removing the supernatant after each cycle and diluting with 14 mL of Binding Buffer before the second cycle. Cells were re-suspended in 1.0 mL of Cell Binding Buffer, and counted with a BioRad TC20 automated cell counter. Live cell counts were >95% as indicated by trypan blue staining. The cell concentrations were adjusted to 2.0×10⁶ cells/mL with additional Binding Buffer. 100 μL aliquots of the cell suspensions were transferred to Eppendorf tubes and placed on ice.

Binding of scFv-O.G. 488 Conjugate and Negative Controls

[0700] To each 100 μL cell aliquot was added 31.3 μL of 0.048 μg/μL Trastuzumab scFv construct (either -GGY tagged or un-tagged and subject to abTYR-mediated O.C. conditions with or without O.G.-488 or abTYR) so that 1.5 μg of scFv was added to each sample. Samples were incubated on ice for 1 hour in the dark. Samples were then subject to 3 cycles of centrifugation (300 g, 3 min), re-suspending cells in 1000 μL of Cell Binding Buffer before each cycle and discarding supernatant after each cycle. After centrifugation, cell pellets were re-suspended in 1000 μL of DPBS with 0.5% paraformaldehyde and kept on ice for 1-3 hours until ready for flow cytometry analysis.

Binding of Protein-L-AN₂₀GGY-O.G. 488 Conjugate to Trastuzumab scFv-Treated Cells

[0701] To each 100 μL cell aliquot was added 2.0 μL of 1.5 μg/μL un-tagged Trastuzumab scFv. Samples were incubated on ice for 1 hour, protected from light. Samples were then subject to 2 cycles of centrifugation (300 g, 3 min), re-suspending cells in 1000 μL of Cell Binding Buffer before each cycle and discarding supernatant after each cycle. Cell pellets were re-suspended in 100 μL of Cell Binding Buffer and 60 μL of 0.045 μg/μL Protein-L-AN₂₀GGY-O.G. 488 conjugate or negative control construct was added for a total of 2.7 μg of Protein L construct per sample. Samples were incubated on ice in the dark for 1 hour. Samples were then subject to 3 cycles of centrifugation (300 g, 3 min), re-suspending cells in 1000 μL of Cell Binding Buffer before each cycle and discarding supernatant after each cycle. After centrifugation, cell pellets were re-suspended in 1000 μL of DPBS with 0.5% paraformaldehyde and kept on ice for 1-3 hours until ready for flow cytometry analysis.

### Example 4

[0702] Here it is shown that the D55K mutant of bmTYR (amino acid sequence set forth in FIG. 10M) is able to efficiently couple DNA labeled with a phenol to cysteine-containing proteins. In this experiment, oligonucleotides bearing a C6-Amine linker (purchased from Integrated DNA Technologies) were modified with a phenol by incubating with a 10× molar excess of NHS-Phenol at pH 8.0 for 2 hours at RT and purified by ion exchange. The reaction conditions were as follows: i) 50 μM GFP; 157 nM abTYR (or equivalent activity of bmTYR or D55K bmTYR); ii) 250 μM DNA-phenol; iii) 10 mM phosphate, pH 6.5. The reaction was allowed to proceed for 30 minutes at room temperature (RT). GFP: 27.550 kDa; DNA: ˜8 kDa.

[0703] The data are depicted in FIG. 35. The appearance of the large dark band above the GFP indicates that DNA coupling was successful using either bmTYR or D55K bmTYR, but not abTYR.

[0704] This reaction can be carried out in the opposite orientation, i.e., by combining a protein with an N-terminal or C-terminal tyrosine tag and an oligonucleotide with a thiol modification, still yielding the protein-nucleotide conjugate.

### Example 5

[0705] FIG. 36A-36C depict coupling of nucleic acids to polypeptides using methods of the present disclosure.

[0706] As depicted in FIG. 36A, NHS phenol is coupled to an amine terminal nucleotide of a nucleic acid, to generate a phenol-containing nucleic acid (nucleic acid-phenol). As depicted in FIG. 36C, the nucleic acid-phenol is then coupled to a thiol containing protein (e.g., using a tyrosinase with a D55K substitution (e.g., a TYR polypeptide as depicted in FIG. 10M)), generating a nucleic acid-protein conjugate. As depicted in FIG. 36B, the abTYR (FIG. 8; FIG. 9) does not catalyze the reaction.

[0707] A restriction endonuclease can be included in the nucleotide sequence of the nucleic acid, providing for the ability to selectively cleave the nucleic acid from the protein of the nucleic acid-protein conjugate.

### Example 6: Charge Preference of TYR Mutants

[0708] In these experiments 50 μM Y182C GFP was combined with 200 μM of EEEEY (SEQ ID NO: 955), RRRRY (SEQ ID NO: 951), or both with an equivalent activity to 200 nm abTYR of the relevant tyrosinase. Reactions proceeded for 30 min at RT before quenching with tropolone and analysis by ESI-TOF MS. The data are shown in FIG. 37A-37C.

[0709] FIG. 37A-37C show the impact of various mutations to bmTYR on its preference for charged substrates. As shown in FIG. 37C, wild type bmTYR (amino acid sequence provided in FIG. 10A) has a slight preference for the negatively charged substrate EEEEY (SEQ ID NO: 955) (product mass 28260). As shown in FIG. 37B, the R209H mutant (amino acid sequence provided in FIG. 10C) shows more activity for the cationic RRRRY (SEQ ID NO: 951) substrate (product mass 28369). As shown in FIG. 37A, the D55K mutant (amino acid sequence provided in FIG. 10M) shows virtually no activity towards the cationic RRRRY (SEQ ID NO: 951) substrate.

[0710] As shown in FIG. 38, the abTYR shows no ability to activate the negatively charged EEEEY (SEQ ID NO: 955) substrate (expected mass for the product=28260), leaving only the starting material at mass=27548.

### Example 7: Biotin as a Linker/Marker

[0711] To analyze the stability of the tyrosine-thiol bond, 200 μM Biotin-PEG₄-Phenol was combined with 50 μM Y182C GFP and 200 nM abTYR for 1 hour at RT. In a comparative reaction, 500 μM Biotin-Maleimide was separately incubated with 50 μM Y182C GFP for 2 hrs at RT before buffer exchange to remove excess maleimide. This produced Tyrosine-GFP-biotin and Maleimide-GFP-biotin, which were then incubated in human serum (from Sigma Aldrich) or buffer. After incubation, samples were combined with 25 L streptavidin magnetic beads (from New England Biolabs) for 1 hour at RT. After 3 rounds of washing samples were eluted from the beads by incubating with a mixture of 80% acetonitrile, 5% formic acid, and 2 mM biotin for 10 min at RT. Samples were then analyzed on an Agilent 6224 ESI-TOF mass spectrometer and the relative masses were quantified.

[0712] The data are shown in FIG. 40A-40C. Tyrosine-GFP-biotin (BT) and Maleimide-GFP-biotin (BM) were incubated in human serum for 1 day (FIG. 40A), 2 days (FIG. 40B), or 7 days (FIG. 40C), at either room temperature (RT) or at 37° C. (“37”). As shown in FIG. 40A and FIG. 40B, both Tyrosine-GFP-biotin and Maleimide-GFP-biotin were still present. However, as shown in FIG. 40C, after 7 days, Maleimide-GFP-biotin (BM) conjugates were no longer detected, while Tyrosine-GFP-biotin levels remained high, even with incubation at 37° C. These results indicate that the thiol-phenol coupling generated using tyrosinase is stable in human serum and is more stable than the maleimide coupling.

### Example 8: Coupling Ig Fc Proteins or a Nanobody to a CRISPR/Cas Effector Polypeptide

[0713] An immunoglobulin (Ig) Fc and a nanobody were separately conjugated to a Cas9 protein using a method of the present disclosure. 10 μM Cas9 and 20 μM Fc domain were combined with 200 nM abTYR for 1 hour, on ice, in 20 mM Phosphate, 200 mM Trehalose, and 300 mM NaCl at pH 6.5. 10 μM Cas9 was combined with 20 μM nanobody in the trehalose buffer for 1 hour. Conjugates were analyzed on a gel, either alone or complexed with a guide RNA. The data are shown in FIG. 41.

[0714] Lanes 2, 3, 4, and 6 are unconjugated Ig Fc (comprising an NNNY (SEQ ID NO: 1059) sequence), unconjugated Ig Fc (comprising a GGYNNN (SEQ ID NO: 1060) sequence), nanobody, and Cas9, respectively. Lanes 8 and 9 are Cas9-Ig Fc conjugate without (Lane 8) or with (Lane 9) guide RNA. Lanes 10 and 11 are Cas9-Ig Fc conjugate without (Lane 10) or with (Lane 11) guide RNA. Lanes 12 and 13 are Nanobody-Cas9 conjugate without (Lane 12) or with (Lane 13) guide RNA.

[0715] The nanobody-Cas9 conjugate was analyzed using TOF-MS. The data are shown in FIG. 42.

### Example 9: Modifying the Surface of Live Mammalian Cells

[0716] The methods described herein can be used for the direct labeling of live mammalian cell surfaces, e.g., using the tyrosinase and a tyrosine-tagged antigen-binding proteins. As a model substrate, GFP-binding nanobodies were attached to Jurkat cells; after attachment to the cell surface, the nanobodies retain the ability to bind antigen. The method is depicted schematically in FIG. 43A.

[0717] In brief, Jurkat cells were suspended in solution with 400 nM abTYR and 10 to 200 M of a GFP binding nanobody. After the reaction, cells were rinsed with 25 μM GFP before final rinsing and analysis via flow cytometry. The data are shown in FIG. 43B. The increasing levels of green fluorescence based on nanobody concentration show that there was a dose-dependent binding of GFP to the nanobody-conjugated cells.

[0718] While the present invention has been described with reference to the specific embodiments thereof, it should be understood by those skilled in the art that various changes may be made and equivalents may be substituted without departing from the true spirit and scope of the invention. In addition, many modifications may be made to adapt a particular situation, material, composition of matter, process, process step or steps, to the objective, spirit and scope of the present invention. All such modifications are intended to be within the scope of the claims appended hereto.

1.-33. (canceled)

34. A composition, comprising:
a target molecule comprising a thiol of formula (III): [chemical structure]
and
a biomolecule comprising a phenol moiety or a catechol moiety of formula (I): [chemical structure]
wherein:
Y¹ is a biomolecule, optionally comprising one or more moieties selected from, an active small molecule, an affinity tag, a fluorophore, and a metal-chelating agent;
X¹ is selected from hydrogen and hydroxyl;
L is an optional linker; and
Y² is a second biomolecule.

35.-40. (canceled)

41. A kit comprising:
a first container comprising a composition of claim 34; and
a second container comprising an enzyme capable of oxidizing the phenol or catechol moiety.

42.-46. (canceled)

47. A modified target molecule, of formula (IV) or (IVA): [chemical structure]
wherein:
Y¹ is a first biomolecule, optionally comprising one or more moieties selected from, an active small molecule, an affinity tag, a fluorophore, and a metal-chelating agent;
L is an optional linker;
Y² is a second biomolecule; and
n is an integer from 1 to 3.

48. The modified target molecule of claim 47, wherein the modified target molecule of formula (IV) is of any of formulae (IV1)—(IV5):

[chemical structure]

49. The modified target molecule of claim 47, wherein the modified target molecule of formula (IVA) is of any of formulae (IVA1)-(IVA5):

[chemical structure]

50. The modified target molecule of claim 47, wherein L is a cleavable linker.

51. The modified target molecule of claim 47, wherein Y¹ comprises a polypeptide.

52. The modified target molecule of claim 51, wherein Y¹ comprises at least one of a fluorescent protein, an antibody or antibody fragment, a polynucleotide, a glycopolypeptide, a domain from a protein, a peptide, a cytokine, a chemokine, a peptide hormone, and an enzyme.

53. The modified target molecule of claim 47, described by the formula (IVB) or (IVC): [chemical structure]
wherein:
Y¹ is a biomolecule optionally comprising one or more groups selected from, an active small molecule, an affinity tag, a fluorophore, and a metal-chelating agent;
each R¹ is independently selected from hydrogen, acyl, substituted acyl, alkyl, and substituted alkyl;
Y² is a second biomolecule;
L¹ is a linker selected from a straight or branched alkyl, a straight or branched substituted alkyl, a polyethylene glycol (PEG), a substituted PEG, and one or more peptides; and
n is an integer from 1 to 3.

54. The modified target molecule of claim 53, wherein the modified target molecule of formula (IVB) is of any of formulae (IVB1)—(IVZB5):

[chemical structure]

55. The modified target molecule of claim 53, wherein the modified target molecule of formula (IV) is of any one of formulae (IVC1)—(IVC5)

[chemical structure]

56. The modified target molecule of claim 47, described by any of formula (IVD)-(IVG): [chemical structure]
wherein:
R² is selected from alkyl, and substituted alkyl;
R³ is selected from, hydrogen, alkyl substituted alkyl, a peptide, and a polypeptide; and
n is an integer from 1 to 3.

57. The modified target molecule of claim 47, wherein Y² is a CRISPR-Cas effector polypeptide.

58. A method for chemoselective coupling of a first polypeptide and a second polypeptide to a coupling polypeptide, the method comprising:
a) contacting the first polypeptide with the coupling polypeptide, to generate a first polypeptide-coupling polypeptide conjugate,
wherein the first polypeptide comprises a thiol moiety,
wherein the coupling polypeptide comprises an N-terminal reactive moiety that forms a covalent bond with the thiol moiety present in the first polypeptide,
wherein the coupling polypeptide comprising the N-terminal reactive moiety is generated by reaction of a polypeptide comprising an N-terminal phenol or catechol moiety and a C-terminal phenol or catechol moiety with a first enzyme capable of oxidizing the N-terminal phenol or catechol moiety, but not the C-terminal phenol or catechol moiety, to generate the N-terminal reactive moiety;
wherein the coupling polypeptide comprises two or more positively charged or neutral amino acids within ten amino acids of the N-terminal phenol or catechol moiety and two or more negatively charged amino acids within ten amino acids of the C-terminal phenol or catechol moiety; and
b) contacting the second polypeptide with the first polypeptide-coupling polypeptide conjugate,
wherein the second polypeptide comprises a thiol moiety,
wherein the first polypeptide-coupling polypeptide conjugate comprises a C-terminal reactive moiety that forms a covalent bond with the thiol moiety present in the second polypeptide,
wherein the first polypeptide-coupling polypeptide conjugate comprising the C-terminal reactive moiety is generated by reaction of the first polypeptide-coupling polypeptide conjugate with a second enzyme capable of oxidizing the C-terminal phenol or catechol moiety to generate a C-terminal reactive moiety; and
wherein said contacting generates a first polypeptide-coupling polypeptide-second polypeptide conjugate.

59.-71. (canceled)

72. The modified target molecule of claim 47, wherein the first biomolecule or the second biomolecule comprises a polypeptide, a nucleic acid, or a small molecule.

73. The modified target molecule of claim 72, wherein the first biomolecule or the second biomolecule further comprises one or more moieties selected from a small molecule, an affinity tag, a fluorophore, and a metal-chelating agent.

74. The modified target molecule of claim 47, wherein the first biomolecule or the second biomolecule comprises an antibody or antibody fragment.

75. The modified target molecule of claim 74, wherein the antibody or antibody fragment is a single variable domain (VHH) antibody or a camelid antibody.

76. The modified target molecule of claim 74, wherein the antibody or the antibody fragment comprises an anti-HER2 antibody.

77. The modified target molecule of claim 72, wherein the nucleic acid comprises at least one of a single-stranded DNA molecule, double-stranded DNA molecule, a single-stranded RNA molecule, a small interfering RNA (siRNA), a short hairpin RNA (shRNA), a microRNA (miRNA), a ribozyme, shRNA, an antisense oligonucleotide, a self-cleaving RNA, a microRNA, a microRNA mimic, a supermir, an aptamer, an antimir, an antagomir, a U1 adaptor, a triplex-forming oligonucleotide, an RNA activator, a long non-coding RNA, a short non-coding RNA, a piRNA, an immunomodulatory oligonucleotide, an antiviral oligonucleotide, or a decoy oligonucleotide.

The application's sequence listing, which the Patent Office published only in electronic form, follows.

SEQUENCE LISTING (1060 sequences)

SEQ ID NO: 1 - protein, 15 aa, synthetic construct
IGLDIGTNSVGWAVI

SEQ ID NO: 2 - protein, 8 aa, synthetic construct
IVIEMARE

SEQ ID NO: 3 - protein, 27 aa, synthetic construct
DVDHIVPQSFLKDDSIDNKVLTRSDKN

SEQ ID NO: 4 - protein, 8 aa, synthetic construct
HHAHDAYL

SEQ ID NO: 5 - protein, 1368 aa, Streptococcus pyogenes [sequence omitted]

SEQ ID NO: 6 - protein, 1367 aa, Streptococcus pyogenes
MDKKYSIGLDIGTNSVGWAVITDDYKVPSKKLKVLGNTDRHGIKKNLIGALLFDSGETAEATRLKRTARRRYTRRKNRICYLQEIFSNEMAKVDDSFFHRLEESFLVEEDKKHERHPIFGNIVDEVAYHEKYPTIYHLRKKLADSTDKVDLRLIYLALAHMIKFRGHFLIEGDLNPDNSDVDKLFIQLVQTYNQLFEENPINASRVDAKAILSARLSKSRRLENLIAQLPGEKKNGLFGNLIALSLGLTPNFKSNFDLAEDAKLQLSKDTYDDDLDNLLAQIGDQYADLFLAAKNLSDAILLSDILRVNSEITKAPLSASMIKRYDEHHQDLTLLKALVRQQLPEKYKEIFFDQSKNGYAGYIDGGASQEEFYKFIKPILEKMDGTEELLAKLNREDLLRKQRTFDNGSIPYQIHLGELHAILRRQEDFYPFLKDNREKIEKILTFRIPYYVGPLARGNSRFAWMTRKSEETITPWNFEEVVDKGASAQSFIERMTNFDKNLPNEKVLPKHSLLYEYFTVYNELTKVKYVTEGMRKPAFLSGEQKKAIVDLLFKTNRKVTVKQLKEDYFKKIECFDSVEISGVEDRFNTSLGTYHDLLKIIKDKDFLDNEENEDILEDIVLTLTLFEDKEMIEERLKKYANLFDDKVMKQLKRRHYTGWGRLSRKLINGIRDKQSGKTILDFLKSDGFANRNFMQLINDDSLTFKEAIQKAQVSGQGHSLHEQIANLAGSPAIKKGILQTVKIVDELVKVMGHKPENIVIEMARENQTTQKGQKNSRERMKRIEEGIKELGSQILKEHPVENTQLQNEKLYLYYLQNGRDMYVDQELDINRLSDYDVDHIVPQSFLKDDSIDNKVLTRSDKNRGKSDNVPSEEVVKKMKNYWRQLLNAKLITQRKFDNLTKAERGGLSELDKAGFIKRQLVETRQITKHVAQILDSRMNTKYDENDKLIREVKVITLKSKLVSDFRKDFQFYKVREINNYHHAHDAYLNAVVGTALIKKYPKLESEFVYGDYKVYDVRKMIAKSEQEIGKATAKYFFYSNIMNFFKTEITLANGEIRKRPLIETNGETGEIVWDKGRDFATVRKVLSMPQVNIVKKTEVQTGGFSKESILPKRNSDKLIARKKDWDPKKYGGFDSPTVAYSVLVVAKVEKGKSKKLKSVKELLGITIMERSSFEKNPIDFLEAKGYKEVRKDLIIKLPKYSLFELENGRKRMLASAGELQKGNELALPSKYVNFLYLASHYEKLKGSPEDNEQKQLFVEQHKHYLDEIIEQISEFSKRVILADANLDKVLSAYNKHRDKPIREQAKNIIHLFTLTNLGAPAAFKYFDTTIERNRYKSIKEVLDATLIHQSITGLYEIRIDLSQLGGD

SEQ ID NO: 7 - protein, 1056 aa, Pasteurella multocida
MQTTNLSYILGLDLGIASVGWAVVEINENEDPIGLIDVGVRIFERAEVPKTGESLALSRRLARSTRRLIRRRAHRLLLAKRFLKREGILSTIDLEKGLPNQAWELRVAGLERRLSAIEWGAVLLHLIKHRGYLSKRKNESQTNNKELGALLSGVAQNHQLLQSDDYRTPAELALKKFAKEEGHIRNQRGAYTHTFNRLDLLAELNLLFAQQHQFGNPHCKEHIQQYMTELLMWQKPALSGEAILKMLGKCTHEKNEFKAAKHTYSAERFVWLTKLNNLRILEDGAERALNEEERQLLINHPYEKSKLTYAQVRKLLGLSEQAIFKHLRYSKENAESATFMELKAWHAIRKALENQGLKDTWQDLAKKPDLLDEIGTAFSLYKTDEDIQQYLTNKVPNSVINALLVSLNFDKFIELSLKSLRKILPLMEQGKRYDQACREIYGHHYGEANQKTSQLLPAIPAQEIRNPVVLRTLSQARKVINAIIRQYGSPARVHIETGRELGKSFKERREIQKQQEDNRTKRESAVQKFKELFSDFSSEPKSKDILKFRLYEQQHGKCLYSGKEINIHRLNEKGYVEIDHALPFSRTWDDSFNNKVLVLASENQNKGNQTPYEWLQGKINSERWKNFVALVLGSQCSAAKKQRLLTQVIDDNKFIDRNLNDTRYIARFLSNYIQENLLLVGKNKKNVFTPNGQITALLRSRWGLIKARENNNRHHALDAIVVACATPSMQQKITRFIRFKEVHPYKIENRYEMVDQESGEIISPHFPEPWAYFRQEVNIRVFDNHPDTVLKEMLPDRPQANHQFVQPLFVSRAPTRKMSGQGHMETIKSAKRLAEGISVLRIPLTQLKPNLLENMVNKEREPALYAGLKARLAEFNQDPAKAFATPFYKQGGQQVKAIRVEQVQKSGVLVRENNGVADNASIVRTDVFIKNNKFFLVPIYTWQVAKGILPNKAIVAHKNEDEWEEMDEGAKFKFSLFPNDLVELKTKKEYFFGYYIGLDRATGNISLKEHDGEISKGKDGVYRVGVKLALSFEKYQVDELGKNRQICRPQQRQPVR

SEQ ID NO: 8 - protein, 1368 aa, Streptococcus pyogenes
MDKKYSIGLDIGTNSVGWAVITDDYKVPSKKLKGLGNTDRHGIKKNLIGALLFDSGETAEATRLKRTARRRYTRRKNRICYLQEIFSNEMAKVDDSFFHRLEESFLVEEDKKHERHPIFGNIVDEVAYHEKYPTIYHLRKKLADSTDKVDLRLIYLALAHMIKFRGHFLIEGDLNPDNSDVDKLFIQLVQTYNQLFEENPINASRVDAKAILSARLSKSRRLENLIAQLPGEKKNGLFGNLIALSLGLTPNFKSNFDLAEDAKLQLSKDTYDDDLDNLLAQIGDQYADLFLAAKNLSDATLLSDILRVNSEITKAPLSASMIKRYDEHHQDLTLLKALVRQQLPEKYKEIFFDQSKNGYAGYIDGGASQEEFYKFIKPILEKMDGTEELLAKLNREDLLRKQRTFDNGSIPYQIHLGELHAILRRQEDFYPFLKDNREKIEKILTFRIPYYVGPLARGNSRFAWMTRKSEETITPWNFEEVVDKGASAQSFIERMTNFDKNLPNEKVLPKHSLLYEYFTVYNELTKVKYVTEGMRKPAFLSGEQKKAIVDLLFKTNRKVTVKQLKEDYFKKIECFDSVEISGVEDRFNASLGTYHDLLKIIKDKDFLDNEENEDILEDIVLTLTLFEDREMIEERLKTYAHLFDDKVMKQLKRRRYTGWGRLSRKLINGIRDKQSGKTILDFLKSDGFANRNFMQLIHDDSLTFKEDIQKAQVSGQGDSLHEHIANLAGSPAIKKGILQTVKVVDELVKVMGRHKPENIVIEMARENQTTQKGQKNSRERMKRIEEGIKELGSDILKEYPVENTQLQNEKLYLYYLQNGRDMYVDQELDINRLSDYDVDHIVPQSFLKDDSIDNKVLTRSDKNRGKSDNVPSEEVVKKMKNYWRQLLNAKLITQRKFDNLTKAERGGLSELDKVGFIKRQLVETRQITKHVAQILDSRMNTKYDENDKLIREVRVITLKSKLVSDFRKDFQFYKVREINNYHHAHDAYLNAVVGTALIKKYPKLESEFVYGDYKVYDVRKMIAKSEQEIGKATAKYFFYSNIMNFFKTEITLANGEIRKRPLIETNGETGEIVWDKGRDFATVRKVLSMPQVNIVKKTEVQTGGFSKESILPKRNSDKLIARKKDWDPKKYGGFDSPTVAYSVLVVAKVEKGKSKKLKSVKELLGITIMERSSFEKDPIDFLEAKGYKEVRKDLIIKLPKYSLFELENGRKRMLASAGELQKGNELALPSKYVNFLYLASHYEKLKGSPEDNEQKQLFVEQHKHYLDEIIEQISEFSKRVILADANLDKVLSAYNKHRDKPIREQAENIIHLFTLTNLGAPAAFKYFDTTIDRKRYTSTKEVLDATLIHQSITGLYETRIDLSQLGGD

SEQ ID NO: 9 - protein, 1334 aa, Listeria innocua
MKKPYTIGLDIGTNSVGWAVLTDQYDLVKRKMKIAGDSEKKQIKKNFWGVRLFDEGQTAADRRMARTARRRIERRRNRISYLQGIFAEEMSKTDANFFCRLSDSFYVDNEKRNSRHPFFATIEEEVEYHKNYPTIYHLREELVNSSEKADLRLVYLALAHIIKYRGNFLIEGALDTQNTSVDGIYKQFIQTYNQVFASGIEDGSLKKLEDNKDVAKILVEKVTRKEKLERILKLYPGEKSAGMFAQFISLIVGSKGNFQKPFDLIEKSDIECAKDSYEEDLESLLALIGDEYAELFVAAKNAYSAVVLSSIITVAETETNAKLSASMIERFDTHEEDLGELKAFIKLHLPKHYEEIFSNTEKHGYAGYIDGKTKQADFYKYMKMTLENIEGADYFIAKIEKENFLRKQRTFDNGAIPHQLHLEELEAILHQQAKYYPFLKENYDKIKSLVTFRIPYFVGPLANGQSEFAWLTRKADGEIRPWNIEEKVDFGKSAVDFIEKMTNKDTYLPKENVLPKHSLCYQKYLVYNELTKVRYINDQGKTSYFSGQEKEQIFNDLFKQKRKVKKKDLELFLRNMSHVESPTIEGLEDSFNSSYSTYHDLLKVGIKQEILDNPVNTEMLENIVKILTVFEDKRMIKEQLQQFSDVLDGVVLKKLERRHYTGWGRLSAKLLMGIRDKQSHLTILDYLMNDDGLNRNLMQLINDSNLSFKSIIEKEQVTTADKDIQSIVADLAGSPAIKKGILQSLKIVDELVSVMGYPPQTIVVEMARENQTTGKGKNNSRPRYKSLEKAIKEFGSQILKEHPTDNQELRNNRLYLYYLQNGKDMYTGQDLDIHNLSNYDIDHIVPQSFITDNSIDNLVLTSSAGNREKGDDVPPLEIVRKRKVFWEKLYQGNLMSKRKFDYLTKAERGGLTEADKARFIHRQLVETRQITKNVANILHQRFNYEKDDHGNTMKQVRIVTLKSALVSQFRKQFQLYKVRDVNDYHHAHDAYLNGVVANTLLKVYPQLEPEFVYGDYHQFDWFKANKATAKKQFYTNIMLFFAQKDRIIDENGEILWDKKYLDTVKKVMSYRQMNIVKKTEIQKGEFSKATIKPKGNSSKLIPRKTNWDPMKYGGLDSPNMAYAVVIEYAKGKNKLVFEKKIIRVTIMERKAFEKDEKAFLEEQGYRQPKVLAKLPKYTLYECEEGRRRMLASANEAQKGNQQVLPNHLVTLLHHAANCEVSDGKSLDYIESNREMFAELLAHVSEFAKRYTLAEANLNKINQLFEQNKEGDIKAIAQSFVDLMAFNAMGAPASFKFFETTIERKRYNNLKELLNSTIIYQSITGLYESRKRLDD

SEQ ID NO: 10 - protein, 1368 aa, Streptococcus pyogenes; identical to SEQ ID NO: 8

SEQ ID NO: 11 - protein, 1370 aa, Streptococcus agalactiae
MNKPYSIGLDIGTNSVGWSIITDDYKVPAKKMRVLGNTDKEYIKKNLIGALLFDGGNTAADRRLKRTARRRYTRRRNRILYLQEIFAEEMSKVDDSFFHRLEDSFLVEEDKRGSKYPIFATLQEEKDYHEKFSTIYHLRKELADKKEKADLRLIYIALAHIIKFRGHFLIEDDSFDVRNTDISKQYQDFLEIFNTTFENNDLLSQNVDVEAILTDKISKSAKKDRILAQYPNQKSTGIFAEFLKLIVGNQADFKKYFNLEDKTPLQFAKDSYDEDLENLLGQIGDEFADLFSAAKKLYDSVLLSGILTVIDLSTKAPLSASMIQRYDEHREDLKQLKQFVKASLPEKYQEIFADSSKDGYAGYIEGKTNQEAFYKYLSKLLTKQEDSENFLEKIKNEDFLRKQRTFDNGSIPHQVHLTELKAIIRRQSEYYPFLKENQDRIEKILTFRIPYYIGPLAREKSDFAWMTRKTDDSIRPWNFEDLVDKEKSAEAFIHRMTNNDFYLPEEKVLPKHSLIYEKFTVYNELTKVRYKNEQGETYFFDSNIKQEIFDGVFKEHRKVSKKKLLDFLAKEYEEFRIVDVIGLDKENKAFNASLGTYHDLEKILDKDFLDNPDNESILEDIVQTLTLFEDREMIKKRLENYKDLFTESQLKKLYRRHYTGWGRLSAKLINGIRDKESQKTILDYLIDDGRSNRNFMQLINDDGLSFKSIISKAQAGSHSDNLKEVVGELAGSPAIKKGILQSLKIVDELVKVMGYEPEQIVVEMARENQTTNQGRRNSRQRYKLLDDGVKNLASDLNGNILKEYPTDNQALQNERLFLYYLQNGRDMYTGEALDIDNLSQYDIDHIIPQAFIKDDSIDNRVLVSSAKNRGKSDDVPSLEIVKDCKVFWKKLLDAKLMSQRKYDNLTKAERGGLTSDDKARFIQRQLVETRQITKHVARILDERFNNELDSKGRRIRKVKIVTLKSNLVSNFRKEFGFYKIREVNNYHHAHDAYLNAVVAKAILTKYPQLEPEFVYGDYPKYNSYKTRKSATEKLFFYSNIMNFFKTKVTLADGTVVVKDDIEVNNDTGEIVWDKKKHFATVRKVLSYPQNNIVKKTEIQTGGFSKESILAHGNSDKLIPRKTKDIYLDPKKYGGFDSPIVAYSVLVVADIKKGKAQKLKTVTELLGITIMERSRFEKNPSAFLESKGYLNIRADKLIILPKYSLFELENGRRRLLASAGELQKGNELALPTQFMKFLYLASRYNESKGKPEEIEKKQEFVNQHVSYFDDILQLINDFSKRVILADANLEKINKLYQDNKENISVDELANNIINLFTFTSLGAPAAFKFFDKIVDRKRYTSTKEVLNSTLIHQSITGLYETRIDLGKLGED

SEQ ID NO: 12 - protein, 1345 aa, Streptococcus mutans
MKKPYSIGLDIGTNSVGWAVVTDDYKVPAKKMKVLGNTDKSHIEKNLLGALLFDSGNTAEDRRLKRTARRRYTRRRNRILYLQEIFSEEMGKVDDSFFHRLEDSFLVTEDKRGERHPIFGNLEEEVKYHENFPTIYHLRQYLADNPEKVDLRLVYLALAHIIKFRGHFLIEGKFDTRNNDVQRLFQEFLAVYDNTFENSSLQEQNVQVEEILTDKISKSAKKDRVLKLFPNEKSNGRFAEFLKLIVGNQADFKKHFELEEKAPLQFSKDTYEEELEVLLAQIGDNYAELFLSAKKLYDSILLSGILTVTDVGTKAPLSASMIQRYNEHQMDLAQLKQFIRQKLSDKYNEVFSDVSKDGYAGYIDGKTNQEAFYKYLKGLLNKIEGSGYFLDKIEREDFLRKQRTFDNGSIPHQIHLQEMRAIIRRQAEFYPFLADNQDRIEKLLTFRIPYYVGPLARGKSDFAWLSRKSADKITPWNFDEIVDKESSAEAFINRMTNYDLYLPNQKVLPKHSLLYEKFTVYNELTKVKYKTEQGKTAFFDANMKQEIFDGVFKVYRKVTKDKLMDFLEKEFDEFRIVDLTGLDKENKVFNASYGTYHDLCKILDKDFLDNSKNEKILEDIVLTLTLFEDREMIRKRLENYSDLLTKEQVKKLERRHYTGWGRLSAELIHGIRNKESRKTILDYLIDDGNSNRNFMQLINDDALSFKEEIAKAQVIGETDNLNQVVSDIAGSPAIKKGILQSLKIVDELVKIMGHQPENIVVEMARENQFTNQGRRNSQQRLKGLTDSIKEFGSQILKEHPVENSQLQNDRLFLYYLQNGRDMYTGEELDIDYLSQYDIDHIIPQAFIKDNSIDNRVLTSSKENRGKSDDVPSKDVVRKMKSYWSKLLSAKLITQRKFDNLTKAERGGLTDDDKAGFIKRQLVETRQITKHVARILDERFNTETDENNKKIRQVKIVTLKSNLVSNFRKEFELYKVREINDYHHAHDAYLNAVIGKALLGVYPQLEPEFVYGDYPHFHGHKENKATAKKFFYSNIMNFFKKDDVRTDKNGEIIWKKDEHISNIKKVLSYPQVNIVKKVEEQTGGFSKESILPKGNSDKLIPRKTKKFYWDTKKYGGFDSPIVAYSILVIADIEKGKSKKLKTVKALVGVTIMEKMTFERDPVAFLERKGYRNVQEENIIKLPKYSLFKLENGRKRLLASARELQKGNEIVLPNHLGTLLYHAKNIHKVDEPKHLDYVDKHKDEFKELLDVVSNFSKKYTLAEGNLEKIKELYAQNNGEDLKELASSFINLLTFTAIGAPATFKFFDKNIDRKRYTSTTEILNATLIHQSITGLYETRIDLNKLGGD

SEQ ID NO: 13 - protein, 1377 aa, Streptococcus agalactiae
MNKPYSIGLDIGTNSVGWSIITDDYKVPAKKMRVLGNTDKEYIKKNLIGALLFDGGNTAADRRLKRTARRRYTRRRNRILYLQEIFAEEMSKVDDSFFHRLEDSFLVEEDKRGSKYPIFATMQEEKYYHEKFPTIYHLRKELADKKEKADLRLVYLALAHIIKFRGHFLIEDDRFDVRNTDIQKQYQAFLEIFDTTFENNHLLSQNVDVEAILTDKISKSAKKDRILAQYPNQKSTGIFAEFLKLIVGNQADFKKHFNLEDKTPLQFAKDSYDEDLENLLGQIGDEFADLFSVAKKLYDSVLLSGILTVTDLSTKAPLSASMIQRYDEHHEDLKHLKQFVKASLPENYREVFADSSKDGYAGYIEGKTNQEAFYKYLLKLLTKQEGSEYFLEKIKNEDFLRKQRTFDNGSIPHQVHLTELRAIIRRQSEYYPFLKENQDRIEKILTFRIPYYVGPLAREKSDFAWMTRKTDDSIRPWNFEDLVDKEKSAEAFIHRMTNNDLYLPEEKVLPKHSLIYEKFTVYNELTKVRFLAEGFKDFQFLNRKQKETIFNSLFKEKRKVTEKDIISFLNKVDGYEGIAIKGIEKQFNASLSTYHDLKKILGKDFLDNTDNELILEDIVQTLTLFEDREMIKKCLDIYKDFFTESQLKKLYRRHYTGWGRLSAKLINGIRNKENQKTILDYLIDDGSANRNFMQLINDDDLSFKPIIDKARTGSHSDNLKEVVGELAGSPAIKKGILQSLKIVDELVKVMGYEPEQIVVEMARENQTTAKGLSRSRQRLTTLRESLANLKSNILEEKKPKYVKDQVENHHLSDDRLFLYYLQNGRDMYTKKALDIDNLSQYDIDHIIPQAFIKDDSIDNRVLVSSAKNRGKSDDVPSIEIVKARKMFWKNLLDAKLMSQRKYDNLTKAERGGLTSDDKARFIQRQLVETRQITKHVARILDERFNNEVDNGKKICKVKIVTLKSNLVSNFRKEFGFYKIREVNDYHHAHDAYLNAVVAKAILTKYPQLEPEFVYGMYRQKKLSKIVHEDKEEKYSEATRKMFFYSNLMNMFKRVVRLADGSIVVRPVIETGRYMRKTAWDKKKHFATVRKVLSYPQNNIVKKTEIQTGGFSKESILAHGNSDKLIPRKTKDIYLDPKKYGGFDSPIVAYSVLVVADIKKGKAQKLKTVTELLGITIMERSRFEKNPSAFLESKGYLNIRDDKLMILPKYSLFELENGRRRLLASAGELQKGNELALPTQFMKFLYLASRYNESKGKPEEIEKKQEFVNQHVSYFDDILQLINDFSKRVILADANLEKINKLYQDNKENIPVDELANNIINLFTFTSLGAPAAFKFFDKIVDRKRYTSTKEVLNSTLIHQSITGLYETRIDLGKLGED

SEQ ID NO: 14 - protein, 131 aa, Helicobacter hepaticus
MRILGFDIGITSIGWAYVESNELKDCGVRIFTKAENPKNGDSLAAPRREARGARRRLARRKARLNAIKRLLCKEFELNLNDYLANDGELPKAYQTSKDTKSPYELYTAFHWIIFAFCSIASSLSNRQMLPI

SEQ ID NO: 15 - protein, 1059 aa, Wolinella succinogenes
MIERILGVDLGISSLGWAIVEYDKDDEAANRIIDCGVRLFTAAETPKKKESPNKARREARGIRRVLNRRRVRMNMIKKLFLRAGLIQDVDLDGEGGMFYSKANRADVWELRHDGLYRLLKGDELARVLIHIAKHRGYKFIGDDEADEESGKVKKAGVVLRQNFEAAGCRTVGEWLWRERGANGKKRNKHGDYEISIHRDLLVEEVEAIFVAQQEMRSTIATDALKAAYREIAFFVRPMQRIEKMVGHCTYFPEERRAPKSAPTAEKFIAISKFFSTVIIDNEGWEQKIIERKTLEELLDFAVSREKVEFRHLRKFLDLSDNEIFKGLHYKGKPKTAKKREATLFDPNEPTELEFDKVEAEKKAWISLRGAAKLREALGNEFYGRFVALGKHADEATKILTYYKDEGQKRRELTKLPLEAEMVERLVKIGFSDFLKLSLKAIRDILPAMESGARYDEAVLMLGVPHKEKSAILPPLNKTDIDILNPTVIRAFAQFRKVANALVRKYGAFDRVHFELAREINTKGEIEDIKESQRKNEKERKEAADWIAETSFQVPLTRKNILKKRLYIQQDGRCAYTGDVIELERLFDEGYCEIDHILPRSRSADDSFANKVLCLARANQQKTDRTPYEWFGHDAARWNAFETRTSAPSNRVRTGKGKIDRLLKKNFDENSEMAFKDRNLNDTRYMARAIKTYCEQYWVFKNSHTKAPVQVRSGKLTSVLRYQWGLESKDRESHTHHAVDAIIIAFSTQGMVQKLSEYYRFKETHREKERPKLAVPLANFRDAVEEATRIENTETVKEGVEVKRLLISRPPRARVTGQAHEQTAKPYPRIKQVKNKKKWRLAPIDEEKFESFKADRVASANQKNFYETSTIPRVDVYHKKGKFHLVPIYLHEMVLNELPNLSLGTNPEAMDENFFKFSIFKDDLISIQTQGTPKKPAKIIMGYFKNMHGANMVLSSINNSPCEGFTCTPVSMDKKHKDKCKLCPEENRIAGRCLQGFLDYWSQEGLRPPRKEFECDQGVKFALDVKKYQIDPLGYYYEVKQEKRLGTIPQMRSAKKLVKK

SEQ ID NO: 16 - protein, 1409 aa, Wolinella succinogenes
MLVSPISVDLGGKNTGFFSFTDSLDNSQSGTVIYDESFVLSQVGRRSKRHSKRNNLRNKLVKRLFLLILQEHHGLSIDVLPDEIRGLFNKRGYTYAGFELDEKKKDALESDTLKEFLSEKLQSIDRDSDVEDFLNQIASNAESFKDYKKGFEAVFASATHSPNKKLELKDELKSEYGENAKELLAGLRVTKEILDEFDKQENQGNLPRAKYFEELGEYIATNEKVKSFFDSNSLKLTDMTKLIGNISNYQLKELRRYFNDKEMEKGDIWIPNKLHKITERFVRSWHPKNDADRQRRAELMKDLKSKEIMELLTTTEPVMTIPPYDDMNNRGAVKCQTLRLNEEYLDKHLPNWRDIAKRLNHGKFNDDLADSTVKGYSEDSTLLHRLLDTSKEIDIYELRGKKPNELLVKTLGQSDANRLYGFAQNYYELIRQKVRAGIWVPVKNKDDSLNLEDNSNMLKRCNHNPPHKKNQIHNLVAGILGVKLDEAKFAEFEKELWSAKVGNKKLSAYCKNIEELRKTHGNTFKIDIEELRKKDPAELSKEEKAKLRLTDDVILNEWSQKIANFFDIDDKHRQRFNNLFSMAQLHTVIDTPRSGFSSTCKRCTAENRFRSETAFYNDETGEFHKKATATCQRLPADTQRPFSGKIERYIDKLGYELAKIKAKELEGMEAKEIKVPIILEQNAFEYEESLRKSKTGSNDRVINSKKDRDGKKLAKAKENAEDRLKDKDKRIKAFSSGICPYCGDTIGDDGEIDHILPRSHTLKIYGTVFNPEGNLIYVHQKCNQAKADSIYKLSDIKAGVSAQWIEEQVANIKGYKTFSVLSAEQQKAFRYALFLQNDNEAYKKVVDWLRTDQSARVNGTQKYLAKKIQEKLTKMLPNKHLSFEFILADATEVSELRRQYARQNPLLAKAEKQAPSSHAIDAVMAFVARYQKVFKDGTPPNADEVAKLAMLDSWNPASNEPLTKGLSTNQKIEKMIKSGDYGQKNMREVFGKSIFGENAIGERYKPIVVQEGGYYIGYPATVKKGYELKNCKVVTSKNDIAKLEKIIKNQDLISLKENQYIKIFSINKQTISELSNRYFNMNYKNLVERDKEIVGLLEFIVENCRYYTKKVDVKFAPKYIHETKYPFYDDWRRFDEAWRYLQENQNKTSSKDRFVIDKSSLNEYYQPDKNEYKLDVDTQPIWDDFCRWYFLDRYKTANDKKSIRIKARKTFSLLAESGVQGKVFRAKRKIPTGYAYQALPMDNNVIAGDYANILLEANSKTLSLVPKSGISIEKQLDKKLDVIKKTDVRGLAIDNNSFFNADFDTHGIRLIVENTSVKVGNFPISAIDKSAKRMIFRALFEKEKGKRKKKTTISFKESGPVQDYLKVFLKKIVKIQLRTDGSISNIVVRKNAADFTLSFRSEHIQKLLK

SEQ ID NO: 17 - protein, 1374 aa, Fusobacterium nucleatum
MKKQKFSDYYLGFDIGTNSVGWCVTDLDYNVLRFNKKDMWGSRLFDEAKTAAERRVQRNSRRRLKRRKWRLNLLEEIFSDEIMKIDSNFFRRLKESSLWLEDKNSKEKFTLFNDDNYKDYDFYKQYPTIFHLRDELIKNPEKKDIRLIYLALHSIFKSRGHFLFEGQNLKEIKNFETLYNNLISFLEDNGINKSIDKDNIEKLEKIICDSGKGLKDKEKEFKGIFNSDKQLVAIFKLSVGSSVSLNDLFDTDEYKKEEVEKEKISFREQIYEDDKPIYYSILGEKIELLDIAKSFYDFMVLNNILSDSNYISEAKVKLYEEHKKDLKNLKYIIRKYNKENYDKLFKDKNENNYPAYIGLNKEKDKKEVVEKSRLKIDDLIKVIKGYLPKPERIEEKDKTIFNEILNKIELKTILPKQRISDNGTLPYQIHEVELEKILENQSKYYDFLNYEENGVSTKDKLLKTFKFRIPYYVGPLNSYHKDKGGNSWIVRKEEGKILPWNFEQKVDIEKSAEEFIKRMTNKCTYLNGEDVIPKDSFLYSEYIILNELNKVQVNDEFLNEENKRKIIDELFKENKKVSEKKFKEYLLVNQIANRTVELKGIKDSFNSNYVSYIKFKDIFGEKLNLDIYKEISEKSILWKCLYGDDKKIFEKKIKNEYGDILNKDEIKKINSFKFNTWGRLSEKLLTGIEFINLETGECYSSVMEALRRTNYNLMELLSSKFTLQESIDNENKEMNEVSYRDLIEESYVSPSLKRAILQTLKIYEEIKKITGRVPKKVFIEMARGGDESMKNKKIPARQEQLKKLYDSCGNDIANFSIDIKEMKNSLSSYDNNSLRQKKLYLYYLQFGKCMYTGREIDLDRLLQNNDTYDIDHIYPRSKVIKDDSFDNLVLVLKNENAEKSNEYPVKKEIQEKMKSFWRFLKEKNFISDEKYKRLTGKDDFELRGFMARQLVNVRQTTKEVGKILQQIEPEIKIVYSKAEIASSFREMFDFIKVRELNDTHHAKDAYLNIVAGNVYNTKFTEKPYRYLQEIKENYDVKKIYNYDIKNAWDKENSLEIVKKNMEKNTVNITRFIKEEKGELFNLNPIKKGETSNEIISIKPKLYDGKDNKLNEKYGYYTSLKAAYFIYVEHEKKNKKVKTFERITRIDSTLIKNEKNLIKYLVSQKKLLNPKIIKKIYKEQTLIIDSYPYTFTGVDSNKKVELKNKKQLYLEKKYEQILKNALKFVEDNQGETEENYKFIYLKKRNNNEKNETIDAVKERYNIEFNEMYDKFLEKLSSKDYKNYINNKLYTNFLNSKEKFKKLKLWEKSLILREFLKIFNKNTYGKYEIKDSQTKEKLFSFPEDTGRIRLGQSSLGNNKELLEESVTGLFVKKIKL

SEQ ID NO: 18 - protein, 1084 aa, Corynebacterium diphtheriae
MKYHVGIDVGTFSVGLAAIEVDDAGMPIKTLSLVSHIHDSGLDPDEIKSAVTRLASSGIARRTRRLYRRKRRRLQQLDKFIQRQGWPVIELEDYSDPLYPWKVRAELAASYIADEKERGEKLSVALRHIARHRGWRNPYAKVSSLYLPDGPSDAFKAIREEIKRASGQPVPETATVGQMVTLCELGTLKLRGEGGVLSARLQQSDYAREIQEICRMQEIGQELYRKIIDVVFAAESPKGSASSRVGKDPLQPGKNRALKASDAFQRYRIAALIGNLRVRVDGEKRILSVEEKNLVFDHLVNLTPKKEPEWVTIAEILGIDRGQLIGTATMTDDGERAGARPPTHDTNRSIVNSRIAPLVDWWKTASALEQHAMVKALSNAEVDDFDSPEGAKVQAFFADLDDDVHAKLDSLHLPVGRAAYSEDTLVRLTRRMLSDGVDLYTARLQEFGIEPSWTPPTPRIGEPVGNPAVDRVLKTVSRWLESATKTWGAPERVIIEHVREGFVTEKRAREMDGDMRRRAARNAKLFQEMQEKLNVQGKPSRADLWRYQSVQRQNCQCAYCGSPITFSNSEMDHIVPRAGQGSTNTRENLVAVCHRCNQSKGNTPFAIWAKNTSIEGVSVKEAVERTRHWVTDTGMRSTDFKKFTKAVVERFQRATMDEEIDARSMESVAWMANELRSRVAQHFASHGTTVRVYRGSLTAEARRASGISGKLKFFDGVGKSRLDRRHHAIDAAVIAFTSDYVAETLAVRSNLKQSQAHRQEAPQWREFTGKDAEHRAAWRVWCQKMEKLSALLTEDLRDDRVVVMSNVRLRLGNGSAHKETIGKLSKVKLSSQLSVSDIDKASSEALWCALTREPGFDPKEGLPANPERHIRVNGTHVYAGDNIGLFPVSAGSIALRGGYAELGSSFHHARVYKITSGKKPAFAMLRVYTIDLLPYRNQDLFSVELKPQTMSMRQAEKKLRDALATGNAEYLGWLVVDDELVVDTSKIATDQVKAVEAELGTIRRWRVDGFFSPSKLRLRPLQMSKEGIKKESAPELSKIIDRPGWLPAVNKLFSDGNVTVVRRDSLGRVRLESTAHLPVTWKVQ

SEQ ID NO: 19 - protein, 1395 aa, Treponema denticola
MKKEIKDYFLGLDVGTGSVGWAVTDTDYKLLKANRKDLWGMRCFETAETAEVRRLHRGARRRIERRKKRIKLLQELFSQEIAKTDEGFFQRMKESPFYAEDKTILQENTLFNDKDFADKTYHKAYPTINHLIKAWIENKVKPDPRLLYLACHNIIKKRGHFLFEGDFDSENQFDTSIQALFEYLREDMEVDIDADSQKVKEILKDSSLKNSEKQSRLNKILGLKPSDKQKKAITNLISGNKINFADLYDNPDLKDAEKNSISFSKDDFDALSDDLASILGDSFELLLKAKAVYNCSVLSKVIGDEQYLSFAKVKIYEKHKTDLTKLKNVIKKHFPKDYKKVFGYNKNEKNNNNYSGYVGVCKTKSKKLIINNSVNQEDFYKFLKTILSAKSEIKEVNDILTEIETGTFLPKQISKSNAEIPYQLRKMELEKILSNAEKHFSFLKQKDEKGLSHSEKIIMLLTFKIPYYIGPINDNHKKFFPDRCWVVKKEKSPSGKTTPWNFFDHIDKEKTAEAFITSRTNFCTYLVGESVLPKSSLLYSEYTVLNEINNLQIIIDGKNICDIKLKQKIYEDLFKKYKKITQKQISTFIKHEGICNKTDEVIILGIDKECTSSLKSYIELKNIFGKQVDEISTKNMLEEIIRWATIYDEGEGKTILKTKIKAEYGKYCSDEQIKKILNLKFSGWGRLSRKFLETVTSEMPGFSEPVNIITAMRETQNNLMELLSSEFTFTENIKKINSGFEDAEKQFSYDGLVKPLFLSPSVKKMLWQTLKLVKEISHITQAPPKKIFIEMAKGAELEPARTKTRLKILQDLYNNCKNDADAFSSEIKDLSGKIENEDNLRLRSDKLYLYYTQLGKCMYCGKPIEIGHVFDTSNYDIDHIYPQSKIKDDSISNRVLVCSSCNKNKEDKYPLKSEIQSKQRGFWNFLQRNNFISLEKLNRLTRATPISDDETAKFIARQLVETRQATKVAAKVLEKMFPETKIVYSKAETVSMFRNKFDIVKCREINDFHHAHDAYLNIVVGNVYNTKFTNNPWNFIKEKRDNPKIADTYNYYKVFDYDVKRNNITAWEKGKTIITVKDMLKRNTPIYTRQAACKKGELFNQTIMKKGLGQHPLKKEGPFSNISKYGGYNKVSAAYYTLIEYEEKGNKIRSLETIPLYLVKDIQKDQDVLKSYLTDLLGKKEFKILVPKIKINSLLKINGFPCHITGKTNDSFLLRPAVQFCCSNNEVLYFKKIIRFSEIRSQREKIGKTISPYEDLSFRSYIKENLWKKTKNDEIGEKEFYDLLQKKNLEIYDMLLTKHKDTIYKKRPNSATIDILVKGKEKFKSLIIENQFEVILEILKLFSATRNVSDLQHIGGSKYSGVAKIGNKISSLDNCILIYQSITGIFEKRIDLLKV

SEQ ID NO: 20 - protein, 1334 aa, Listeria monocytogenes
MKNPYTIGLDIGTNSVGWAVLTNQYDLVKRKMKVAGNSDKKQIKKNFWGVRLFDDGQTAVDRRMNRTARRRIERRRNRISYLQEIFAVEMANIDANFFCRLNDSFYVDSEKRNSRHPFFATIEEEVAYHDNYRTIYHLREKLVNSSEKADLRLVYLALAHIIKYRGNFLIEGALDTKNTSVDEVYKQFIETYNQVFMSNIEEGALAKVEENIEVANILAGKFTRREKFERILQLYPGEKSTGMFAQFISLIVGSKGNFQKVFDLIEKTDIECAKDSYEEDLETLLAIIGDEYAELFVAAKNTYNAVVLSSIITVTDTETNAKLSASMIERFDAHEKDLVELKAFIKLNLPKQYEEIFSNAAIDGYAGYIDGKTKQVDFYKYLKTILENIEGSDYFIAKIEEENFLRKQRTFDNGAIPHQLHLEELEAIIHQQAKYYPFLKEDYDKIKSLVTFRIPYFVGPLANGQSEFAWLTRKADGEIRPWNIEEKVDFGKSAVDFIEKMTNKDTYLPKENVLPKHSLCYQKYMVYNELTKIRYIDDQGKTNYFSGREKQQVFNDLFKQKRKVKKKDLELFLRNINHIESPTIEGLEDSFNASYATYHDLLKVGMKQEILDNPLNTEMLEDIVKILTVFEDKPMIKEQLQQFSDVLDGGVLKKLERRHYTGWGRLSAKLLVGIREKQSHLTILDYLMNDDGLNRNLMQLINDSNLSFKSIIEKEQVSTTDKDLQSIVAELAGSPAIKKGILQSLKIVDELVSIMGYPPQTIVVEMARENQTTGKGKNNSKPRYKSLEKAIKEFGSQILKEHPTDNQELKNNRLYLYYLQNGKDMYTGQELDIHNLSNYDIDHIVPQSFITDNSIDNLVLTSSAGNREKGGDVPPLEIVRKRKVFWEKLYQGNLMSKRKFDYLTKAERGGLTEADKARFIHRQLVETRQITKNVANILYQRFNKETDNHGNTMEQVRIVTLKSALVSQFRKQFQLYKVREVNGYHHAHDAYLNGVVANTLLKVYPQLEPEFVYGEYHQFDWFKANKATAKKQFYTNIMLFFAQKERIIDENGEILWDKKYLETIKKVLDYRQMNIVKKTEIQKGEFSKATIKPKGNSSKLIPRKENWDPMKYGGLDSPNMAYAVIIEHAKGKKKIVIEKKLIQINIMERKMFEKDEEAFLEEKGYRHPKVLTKLPKYTLYECEKGRRRMLASANEAQKGNQLVLSNHLVSLLYHAKNCEASDGKSLKYIEAHRETFSELLAQVSEFATRYTLADANLSKINNLFEQNKEGDIKAIAQSFVDLMAFNAMGAPASFKFFEATIDRKRYTNLKELLSSTIIYQSITGLYESRKRLDD

SEQ ID NO: 21 - protein, 1236 aa, Mycoplasma mobile
MYFYKNKENKLNKKVVLGLDLGIASVGWCLTDISQKEDNKFPIILHGVRLFETVDDSDDKLLNETRRKKRGQRRRNRRLFTRKRDFIKYLIDNNIIELEFDKNPKILVRNFIEKYINPFSKNLELKYKSVTNLPIGFHNLRKAAINEKYKLDKSELIVLLYFYLSLRGAFFDNPEDTKSKEMNKNEIEIFDKNESIKNAEFPIDKIIEFYKISGKIRSTINLKFGHQDYLKEIKQVFEKQNIDFMNYEKFAMEEKSFFSRIRNYSEGPGNEKSFSKYGLYANENGNPELIINEKGQKIYTKIFKTLWESKIGKCSYDKKLYRAPKNSFSAKVFDITNKLTDWKHKNEYISERLKRKILLSRFLNKDSKSAVEKILKEENIKFENLSEIAYNKDDNKINLPIINAYHSLTTIFKKHLINFENYLISNENDLSKLMSFYKQQSEKLFVPNEKGSYEINQNNNVLHIFDAISNILNKFSTIQDRIRILEGYFEFSNLKKDVKSSEIYSEIAKLREFSGTSSLSFGAYYKFIPNLISEGSKNYSTISYEEKALQNQKNNFSHSNLFEKTWVEDLIASPTVKRSLRQTMNLLKEIFKYSEKNNLEIEKIVVEVTRSSNNKHERKKIEGINKYRKEKYEELKKVYDLPNENTTLLKKLWLLRQQQGYDAYSLRKIEANDVINKPWNYDIDHIVPRSISFDDSFSNLVIVNKLDNAKKSNDLSAKQFIEKIYGIEKLKEAKENWGNWYLRNANGKAFNDKGKFIKLYTIDNLDEFDNSDFINRNLSDTSYITNALVNHLTFSNSKYKYSVVSVNGKQTSNLRNQIAFVGIKNNKETEREWKRPEGFKSINSNDFLIREEGKNDVKDDVLIKDRSFNGHHAEDAYFITIISQYFRSFKRIERLNVNYRKETRELDDLEKNNIKFKEKASFDNFLLINALDELNEKLNQMRFSRMVITKKNTQLFNETLYSGKYDKGKNTIKKVEKLNLLDNRTDKIKKIEEFFDEDKLKENELTKLHIFNHDKNLYETLKIIWNEVKIEIKNKNLNEKNYFKYFVNKKLQEGKISFNEWVPILDNDFKIIRKIRYIKFSSEEKETDEIIFSQSNFLKIDQRQNFSFHNTLYWVQIWVYKNQKDQYCFISIDARNSKFEKDEIKINYEKLKTQKEKLQIINEEPILKINKGDLFENEEKELFYIVGRDEKPQKLEIKYILGKKIKDQKQIQKPVKKYFPNWKKVNLTYMGEIFKK

SEQ ID NO: 22 - protein, 1372 aa, Legionella pneumophila
MESSQILSPIGIDLGGKFTGVCLSHLEAFAELPNHANTKYSVILIDHNNFQLSQAQRRATRHRVRNKKRNQFVKRVALQLFQHILSRDLNAKEETALCHYLNNRGYTYVDTDLDEYIKDETTINLLKELLPSESEHNFIDWFLQKMQSSEFRKILVSKVEEKKDDKELKNAVKNIKNFITGFEKNSVEGHRHRKVYFENIKSDITKDNQLDSIKKKIPSVCLSNLLGHLSNLQWKNLHRYLAKNPKQFDEQTFGNEFLRMLKNFRHLKGSQESLAVRNLIQQLEQSQDYISILEKTPPEITIPPYEARTNTGMEKDQSLLLNPEKLNNLYPNWRNLIPGIIDAHPFLEKDLEHTKLRDRKRIISPSKQDEKRDSYILQRYLDLNKKIDKFKIKKQLSFLGQGKQLPANLIETQKEMETHFNSSLVSVLIQIASAYNKEREDAAQGIWFDNAFSLCELSNINPPRKQKILPLLVGAILSEDFINNKDKWAKFKIFWNTHKIGRTSLKSKCKEIEEARKNSGNAFKIDYEEALNHPEHSNNKALIKIIQTIPDIIQAIQSHLGHNDSQALIYHNPFSLSQLYTILETKRDGFHKNCVAVTCENYWRSQKTEIDPEISYASRLPADSVRPFDGVLARMMQRLAYEIAMAKWEQIKHIPDNSSLLIPIYLEQNRFEFEESFKKIKGSSSDKTLEQAIEKQNIQWEEKFQRIINASMNICPYKGASIGGQGEIDHIYPRSLSKKHFGVIFNSEVNLIYCSSQGNREKKEEHYLLEHLSPLYLKHQFGTDNVSDIKNFISQNVANIKKYISFHLLTPEQQKAARHALFLDYDDEAFKTITKFLMSQQKARVNGTQKFLGKQIMEFLSTLADSKQLQLEFSIKQITAEEVHDHRELLSKQEPKLVKSRQQSFPSHAIDATLTMSIGLKEFPQFSQELDNSWFINHLMPDEVHLNPVRSKEKYNKPNISSTPLFKDSLYAERFIPVWVKGETFAIGFSEKDLFEIKPSNKEKLFTLLKTYSTKNPGESLQELQAKSKAKWLYFPINKTLALEFLHHYFHKEIVTPDDTTVCHFINSLRYYTKKESITVKILKEPMPVLSVKFESSKKNVLGSFKHTIALPATKDWERLFNHPNFLALKANPAPNPKEFNEFIRKYFLSDNNPNSDIPNNGHNIKPQKHKAVRKVFSLPVIPGNAGTMMRIRRKDNKGQPLYQLQTIDDTPSMGIQINEDRLVKQEVLMDAYKTRNLSTIDGINNSEGQAYATFDNWLTLPVSTFKPEIIKLEMKPHSKTRRYIRITQSLADFIKTIDEALMIKPSDSIDDPLNMPNEIVCKNKLFGNELKPRDGKMKIVSTGKIVTYEFESDSTPQWIQTLYVTQLKKQP

SEQ ID NO: 23 - protein, 1122 aa, Streptococcus thermophilus
MSDLVLGLDIGIGSVGVGILNKVTGEIIHKNSRIFPAAQAENNLVRRTNRQGRRLTRRKKHRIVRLNRLFEESGLITDFTKISINLNPYQLRVKGLTDELSNEELFIALKNMVKHRGISYLDDASDDGNSSVGDYAQIVKENSKQLETKTPGQIQLERYQTYGQLRGDFTVEKDGKKHRLINVFPTSAYRSEALRILQTQQEFNSQITDEFINRYLEILTGKRKYYHGPGNEKSRTDYGRYRTNGETLDNIFGILIGKCTFYPDEFRAAKASYTAQEFNLLNDLNNLTVPTETKKLSKEQKNQIINYVKNEKVMGPAKLFKYIAKLLSCDVADIKGHRIDKSGKAEIHTFEAYRKMKTLETLDIEQMDRETLDKLAYVLTLNTEREGIQEALEHEFADGSFSQKQVDELVQFRKANSSIFGKGWHNFSVKLMMELIPELYETSEEQMTILTRLGKQKTTSSSNKTKYIDEKLLTEEIYNPVVAKSVRQAIKIVNAAIKEYGDFDNIVIEMARETNEDDEKKAIQKIQKANKDEKDAAMLKAANQYNGKAELPHSVFHGHKQLATKIRLWHQQGERCLYTGKTISIHDLINNPNQFEVDHILPLSITFDDSLANKVLVYATANQEKGQRTPYQALDSMDDAWSFRELKAFVRESKTLSNKKKEYLLTEEDISKFDVRKKFIERNLVDTRYASRVVLNALQEHFRAHKIDTKVSVVRGQFTSQLRRHWGIEKTRDTYHHHAVDALIIAASSQLNLWKKQKNTLVSYSEEQLLDIETGELISDDEYKESVFKAPYQHFVDTLKSKEFEDSILFSYQVDSKFNRKISDATIYATRQAKVGKDKKDETYVLGKIKDIYTQDGYDAFMKIYKKDKSKFLMYRHDPQTFEKVIEPILENYPNKEMNEKGKEVPCNPFLKYKEEHGYIRKYSKKGNGPEIKSLKYYDSKLLGNPIDITPENSKNKVVLQSLKPWRTDVYFNKNTGKYEILGLKYADLQFEKKTGTYKISQEKYNGIMKEEGVDSDSEFKFTLYKNDLLLVKDTETKEQQLFRFLSRTMPNVKYYVELKPYSKDKFEKNESLIEILGSADKSGRCIKGLGKSNISIYKVRTDVLGNQHIIKNEGDKPKLDF

SEQ ID NO: 24 - protein, 1128 aa, Streptococcus thermophilus
MSDLVLGLDIGIGSVGVGILNKVTGEIIHKNSRIFPAAQAENNLVRRTNRQGRRLTRRKKHRIVRLNRLFEESGLITDFTKISINLNPYQLRVKGLTDELSNEELFIALKNMVKHRGISYLDDASDDGNSSVGDYAQIVKENSKQLETKTPGQIQLERYQTYGQLRGDFTVEKDGKKHRLINVFPTSAYRSEALRILQTQQEFNPQITDEFINRYLEILTGKRKYYHGPGNEKSRTDYGRYRTSGETLDNIFGILIGKCTFYPEEFRAAKASYTAQEFNLLNDLNNLTVPTETKKLSKEQKNQIINYVKNEKAMGPAKLFKYIAKLLSCDVADIKGYRIDKSGKAEIHTFEAYRKMKTLETLDIEQMDRETLDKLAYVLTLNTEREGIQEALEHEFADGSFSQKQVDELVQFRKANSSIFGKGWHNFSVKLMMELIPELYETSEEQMTILTRLGKQKRLRLQIKQNISNKTKYIDEKLLTEEIYNPVVAKSVRQAIKIVNAAIKEYGDFDNIVIEMARETNEDDEKKAIQKIQKANKDEKDAAMLKAANQYNGKAELPHSVFHGHKQLATKIRLWHQQGERCLYTGKTISIHDLINNPNQFEVDHILPLSITFDDSLANKVLVYATANQEKGQRTPYQALDSMDDAWSFRELKAFVRESKTLSNKKKEYLLTEEDISKFDVRKKFIERNLVDTRYASRVVLNALQEHFRAHKIDTKVSVVRGQFTSQLRRHWGIEKTRDTYHHHAVDALIIAASSQLNLWKKQKNTLVSYSEEQLLDIETGELISDDEYKESVFKAPYQHFVDTLKSKEFEDSILFSYQVDSKFNRKISDATIYATRQAKVGKDKKDETYVLGKIKDIYTQDGYDAFMKIYKKDKSKFLMYRHDPQTFEKVIEPILENYPNKQMNEKGKEVPCNPFLKYKEEHGYIRKYSKKGNGPEIKSLKYYDSKLLGNPIDITPENSKNKVVLQSLKPWRTDVYFNKATGKYEILGLKYADLQFEKGTGTYKISQEKYNDIKKKEGVDSDSEFKFTLYKNDLLLVKDTETKEQQLFRFLSRTLPKQKHYVELKPYDKQKFEGGEALIKVLGNVANGGQCIKGLAKSNISIYKVRTDVLGNQHIIKNEGDKPKLDF

SEQ ID NO: 25 - protein, 1123 aa, Francisella tularensis
MNVKILPIAIDLDVKNTGVFSAFYQKGTSLEKLDNKNGKVYELSKDSYTLLMNNRTARRHKRRGIDRKQLVKRLFKLVWTEQLNLEWDKDTQQAISFLFNRRGFSFITDGYSTEYLNIVPEQVKAILMDIFDDYNGEDDLDSYLKLATEQESKISEIYNKLMQKILEFKLRKLCTDIKDDKVSTKTLKEITSYEFELLADYLANYSESLKTQKFSYTDKQGNLKELSYYHHDKYNIQEFLKRHATINDEILGTLLTDDFDIWNFNFEKFDFDKNEEKLQNQEDKDHTQAHLHHFVFVVNKIKSEMASGGRHRSQYFQEITNVLDENNHQEGYLKNFCENLHNKKYSNLSVKNLVNLVGNLSNLELKPLRKYFNDKIHAKADHWDEQKFTETYCHWILGEWRVGVKDQDKKDGAKYSYKDLCNELKQKVTKAGLIDFLLELDPCRTIPPYLDNNNRKPPKCQSLILNPKFLDNQYPNWQQYLQELKKLQSIQDYLDSFETDLKDLKSSKDQPYFVEYKSSNQQMASGQRDYKDLDARILQFIFDRVKASDELLLNEIYFQAKKLKQKASSELEKLESSKKLDEVIANSQLSQILKSQHTNGIFEQGTFLHLVCKYYKQRQRARDSRLYIMPEYRYDKKLDKYNNTGRFDDNNQLLTYCNHKPRQKRYQLLNDLAGVLQVSRNQLLSSVEEWFQQAQRVGEISKSQDEQIFEWLKSFKIASYCKAAVEMQKQYRGTLKNAIQTAIFRQSENINKNKNTGNQQQALSENSKDVKSLTADEKKLLKLIENIAKASQKIGESLGLNDKQIKKFNSIYSFAQIQQIAFAKRKGNANTCAVCSADNAHRMQQIKITELVEDNKDNIILSAKAQRLPAIPTRIVDGAVKKMATILAKNIVDDNWQNIKQVLSAKHQLHIPIITESNAFEFEPALADVKGKSLKDRRKKALERISPENIFKDKNNRIKEFAKGISAYSGANLTDGDFDGAKEELDHIIPRSHKKYGTLNDEANLICVTRDDNKNIFAIDTSKWFEIETPSDLRDIGVATIQYKIDNNSRPKVRVKLDYVIDDDSKINYFMNHSLLKSRYPDKVLEILKQSTIIEFESSGFNKTIKEMLGMTLAGIYNETSNN

SEQ ID NO: 26 - protein, 1436 aa, Bacteroides fragilis
MKRILGLDLGTNSIGWALVNEAENKDERSSIVKLGVRVNPLTVDELTNFEKGKSITTNADRTLKRGMRRNLQRYKLRRETLTEVLKEHKLITEDTILSENGNRTTFETYRLRAKAVTEEISLEEFARVLLMINKKRGYKSSRKAKGVEEGTLIDGMDIARELYNNNLTPGELCLQLLDAGKKFLPDFYRSDLQNELDRIWEKQKEYYPEILTDVLKEELRGKKRDAVWAICAKYFVWKENYTEWNKEKGKTEQQEREHKLEGIYSKRKRDEAKRENLQWRVNGLKEKLSLEQLVIVFQEMNTQINNSSGYLGAISDRSKELYFNKQTVGQYQMEMLDKNPNASLRNMVFYRQDYLDEFNMLWEKQAVYHKELTEELKKEIRDIIIFYQRRLKSQKGLIGFCEFESRQIEVDIDGKKKIKTVGNRVISRSSPLFQEFKIWQILNNIEVTVVGKKRKRRKLKENYSALFEELNDAEQLELNGSRRLCQEEKELLAQELFIRDKMTKSEVLKLLFDNPQELDLNFKTIDGNKTGYALFQAYSKMIEMSGHEPVDFKKPVEKVVEYIKAVFDLLNWNTDILGFNSNEELDNQPYYKLWHLLYSFEGDNTPTGNGRLIQKMTELYGFEKEYATILANVSFQDDYGSLSAKAIHKILPHLKEGNRYDVACVYAGYRHSESSLTREEIANKVLKDRLMLLPKNSLHNPVVEKILNQMVNVINVIIDIYGKPDEIRVELARELKKNAKEREELTKSIAQTTKAHEEYKTLLQTEFGLTNVSRTDILRYKLYKELESCGYKTLYSNTYISREKLFSKEFDIEHIIPQARLFDDSFSNKTLEARSVNIEKGNKTAYDFVKEKFGESGADNSLEHYLNNIEDLFKSGKISKTKYNKLKMAEQDIPDGFIERDLRNTQYIAKKALSMLNEISHRVVATSGSVTDKLREDWQLIDVMKELNWEKYKALGLVEYFEDRDGRQIGRIKDWTKRNDHRHHAMDALTVAFTKDVFIQYFNNKNASLDPNANEHAIKNKYFQNGRAIAPMPLREFRAEAKKHLENTLISIKAKNKVITGNINKTRKKGGVNKNMQQTPRGQLHLETIYGSGKQYLTKEEKVNASFDMRKIGTVSKSAYRDALLKRLYENDNDPKKAFAGKNSLDKQPIWLDKEQMRKVPEKVKIVTLEAIYTIRKEISPDLKVDKVIDVGVRKILIDRLNEYGNDAKKAFSNLDKNPIWLNKEKGISIKRVTISGISNAQSLHVKKDKDGKPILDENGRNIPVDFVNTGNNHHVAVYYRPVIDKRGQLVVDEAGNPKYELEEVVVSFFEAVTRANLGLPIIDKDYKTTEGWQFLFSMKQNEYFVFPNEKTGFNPKEIDLLDVENYGLISPNLFRVQKFSLKNYVFRHHLETTIKDTSSILRGITWIDFRSSKGLDTIVKVRVNHIGQIVSVGEY

SEQ ID NO: 27 - protein, 1314 aa, Mycoplasma synoviae
MLRLYCANNLVLNNVQNLWKYLLLLIFDKKIIFLFKIKVILIRRYMENNNKEKIVIGFDLGVASVGWSIVNAETKEVIDLGVRLFSEPEKADYRRAKRTTRRLLRRKKFKREKFHKLILKNAEIFGLQSRNEILNVYKDQSSKYRNILKLKINALKEEIKPSELVWILRDYLQNRGYFYKNEKLTDEFVSNSFPSKKLHEHYEKYGFFRGSVKLDNKLDNKKDKAKEKDEEEESDAKKESEELIFSNKQWINEIVKVFENQSYLTESFKEEYLKLFNYVRPFNKGPGSKNSRTAYGVFSTDIDPETNKFKDYSNIWDKTIGKCSLFEEEIRAPKNLPSALIFNLQNEICTIKNEFTEFKNWWLNAEQKSEILKFVFTELFNWKDKKYSDKKFNKNLQDKIKKYLLNFALENFNLNEEILKNRDLENDTVLGLKGVKYYEKSNATADAALEFSSLKPLYVFIKFLKEKKLDLNYLLGLENTEILYFLDSIYLAISYSSDLKERNEWFKKLLKELYPKIKNNNLEIIENVEDIFEITDQEKFESFSKTHSLSREAFNHIIPLLLSNNEGKNYESLKHSNEELKKRTEKAELKAQQNQKYLKDNFLKEALVPLSVKTSVLQAIKIFNQIIKNFGKKYEISQVVIEMARELTKPNLEKLLNNATNSNIKILKEKLDQTEKFDDFTKKKFIDKIENSVVFRNKLFLWFEQDRKDPYTQLDIKINEIEDETEIDHVIPYSKSADDSWFNKLLVKKSTNQLKKNKTVWEYYQNESDPEAKWNKFVAWAKRIYLVQKSDKESKDNSEKNSIFKNKKPNLKFKNITKKLFDPYKDLGFLARNLNDTRYATKVFRDQLNNYSKHHSKDDENKLFKVVCMNGSITSFLRKSMWRKNEEQVYRFNFWKKDRDQFFHHAVDASIIAIFSLLTKTLYNKLRVYESYDVQRREDGVYLINKETGEVKKADKDYWKDQHNFLKIRENAIEIKNVLNNVDFQNQVRYSRKANTKLNTQLFNETLYGVKEFENNFYKLEKVNLFSRKDLRKFILEDLNEESEKNKKNENGSRKRILTEKYIVDEILQILENEEFKDSKSDINALNKYMDSLPSKFSEFFSQDFINKCKKENSLILTFDAIKHNDPKKVIKIKNLKFFREDATLKNKQAVHKDSKNQIKSFYESYKCVGFIWLKNKNDLEESIFVPINSRVIHFGDKDKDIFDFDSYNKEKLLNEINLKRPENKKFNSINEIEFVKFVKPGALLLNFENQQIYYISTLESSSLRAKIKLLNKMDKGKAVSMKKITNPDEYKIIEHVNPLGINLNWTKKLENNN

SEQ ID NO: 28 - protein, 1368 aa, Streptococcus pyogenes
MDKKYSIGLDIGTNSVGWAVITDDYKVPSKKFKVLGNTDRHSIKKNLIGALLFDSGETAEATRLKRTARRRYTRRKNRICYLQEIFSNEMAKVDDSFFHRLEESFLVEEDKKHERHPIFGNIVDEVAYHEKYPTIYHLRKKLVDSTDKADLRLIYLALAHMIKFRGHFLIEGDLNPDNSDVDKLFIQLVQTYNQLFEENPINASGVDAKAILSARLSKSRRLENLIAQLPGEKKNGLFGNLIALSLGLTPNFKSNFDLAEDAKLQLSKDTYDDDLDNLLAQIGDQYADLFLAAKNLSDAILLSDILRLNSEITKAPLSASMIKRYDEHHQDLTLLKALVRQQLPEKYKEIFFDQSKNGYAGYIDGGASQEEFYKFIKPILEKMDGTEELLAKLNREDLLRKQRTFDNGSIPHQIHLGELHAILRRQEDFYPFLKDNREKIEKILTFRIPYYVGPLARGNSRFAWMTRKSEETITPWNFEEVVDKGASAQSFIERMTNFDKNLPNEKVLPKHSLLYEYFTVYNELTKVKYVTEGMRKPAFLSGEQKKAIVDLLFKTNRKVTVKQLKEDYFKKIECFDSVEISGVEDRFNASLGTYHDLLKIIKDKDFLDNEENEDILEDIVLTLTLFEDREMIEERLKTYAHLFDDKVMKQLKRRRYTGWGRLSRKLINGIRDKQSGKTILDFLKSDGFANRNFMQLIHDDSLTFKEDIQKAQVSGQGDSLHEHIANLAGSPAIKKGILQTVKVVDELVKVMGRHKPENIVIEMARENQTTQKGQKNSRERMKRIEEGIKELGSQILKEHPVENTQLQNEKLYLYYLQNGRDMYVDQELDINRLSDYDVDHIVPQSFIKDDSIDNKVLTRSDKNRGKSNNVPSEEVVKKMKNYWRQLLNAKLITQRKFDNLTKAERGGLSELDKAGFIKRQLVETRQITKHVAQILDSRMNTKYDENDKLIREVKVITLKSKLVSDFRKDFQFYKVREINNYHHAHDAYLNAVVGTALIKKYPKLESEFVYGDYKVYDVRKMIAKSEQEIGKATAKYFFYSNIMNFFKTEITLANGEIRKRPLIETNGETGEIVWDKGRDFATVRKVLSMPQVNIVKKTEVQTGGFSKESILPKRNSDKLIARKKDWDPKKYGGFDSPTVAYSVLVVAKVEKGKSKKLKSVKELLGITIMERSSFEKNPIDFLEAKGYKEVRKDLIVKLPKYSLFELENGRKRMLASAGELQKGNELALPSKYVNFLYLASHYEKLKGSPEDNEQKQLFVEQHKHYLDEIIEQISEFSKRVILADANLDKVLSAYNKHRDKPIREQAENIIHLFTLTNLGAPAAFKYFDTTIDRKRYTSTKEVLDATFIHQSITGLYETRIDLSQLGGD

SEQ ID NO: 29 - protein, 1368 aa, Streptococcus pyogenes
MDKKYSIGLDIGTNSVGWAVITDDYKVPSKKFKVLGNTDRHSIKKNLIGALLFDSGETAEATRLKRTARRRYTRRKNRICYLQEIFSNEMAKVDDSFFHRLEESFLVEEDKKHERHPIFGNIVDEVAYHEKYPTIYHLRKKLVDSTDKADLRLIYLALAHMIKFRGHFLIEGDLNPDNSDVDKLFIQLVQTYNQLFEENPINASGVDAKAILSARLSKSRRLENLIAQLPGEKKNGLFGNLIALSLGLTPNFKSNFDLAEDAKLQLSKDTYDDDLDNLLAQIGDQYADLFLAAKNLSDAILLSDILRVNTEITKAPLSASMIKRYDEHHQDLTLLKALVRQQLPEKYKEIFFDQSKNGYAGYIDGGASQEEFYKFIKPILEKMDGTEELLVKLNREDLLRKQRTFDNGSIPHQIHLGELHAILRRQEDFYPFLKDNREKIEKILTFRIPYYVGPLARGNSRFAWMTRKSEETITPWNFEEVVDKGASAQSFIERMTNFDKNLPNEKVLPKHSLLYEYFTVYNELTKVKYVTEGMRKPAFLSGEQKKAIVDLLFKTNRKVTVKQLKEDYFKKIECFDSVEISGVEDRFNASLGTYHDLLKIIKDKDFLDNEENEDILEDIVLTLTLFEDREMIEERLKTYAHLFDDKVMKQLKRRRYTGWGRLSRKLINGIRDKQSGKTILDFLKSDGFANRNFMQLIHDDSLTFKEDIQKAQVSGQGDSLHEHIANLAGSPAIKKGILQTVKVVDELVKVMGRHKPENIVIEMARENQTTQKGQKNSRERMKRIEEGIKELGSQILKEHPVENTQLQNEKLYLYYLQNGRDMYVDQELDINRLSDYDVDHIVPQSFLKDDSIDNKVLTRSDKNRGKSDNVPSEEVVKKMKNYWRQLLNAKLITQRKFDNLTKAERGGLSELDKAGFIKRQLVETRQITKHVAQILDSRMNTKYDENDKLIREVKVITLKSKLVSDFRKDFQFYKVREINNYHHAHDAYLNAVVGTALIKKYPKLESEFVYGDYKVYDVRKMIAKSEQEIGKATAKYFFYSNIMNFFKTEITLANGEIRKRPLIETNGETGEIVWDKGRDFATVRKVLSMPQVNIVKKTEVQTGGFSKESILPKRNSDKLIARKKDWDPKKYGGFDSPTVAYSVLVVAKVEKGKSKKLKSVKELLGITIMERSSFEKNPIDFLEAKGYKEVKKDLIIKLPKYSLFELENGRKRMLASAGELQKGNELALPSKYVNFLYLASHYEKLKGSPEDNEQKQLFVEQHKHYLDEIIEQISEFSKRVILADANLDKVLSAYNKHRDKPIREQAENIIHLFTLTNLGAPAAFKYFDTTIDRKRYTSTKEVLDATLIHQSITGLYETRIDLSQLGGD

SEQ ID NO: 30 - protein, 1370 aa, Streptococcus agalactiae; identical to SEQ ID NO: 11

SEQ ID NO: 31 - protein, 1173 aa, Rhodospirillum rubrum
MRPIEPWILGLDIGTDSLGWAVFSCEEKGPPTAKELLGGGVRLFDSGRDAKDHTSRQAERGAFRRARRQTRTWPWRRDRLIALFQAAGLTPPAAETRQIALALRREAVSRPLAPDALWAALLHLAHHRGFRSNRIDKRERAAAKALAKAKPAKATAKATAPAKEADDEAGFWEGAEAALRQRMAASGAPTVGALLADDLDRGQPVRMRYNQSDRDGVVAPTRALIAEELAEIVARQSSAYPGLDWPAVTRLVLDQRPLRSKGAGPCAFLPGEDRALRALPTVQDFIIRQTLANLRLPSTSADEPRPLTDEEHAKALALLSTARFVEWPALRRALGLKRGVKFTAETERNGAKQAARGTAGNLTEAILAPLIPGWSGWDLDRKDRVFSDLWAARQDRSALLALIGDPRGPTRVTEDETAEAVADAIQIVLPTGRASLSAKAARAIAQAMAPGIGYDEAVTLALGLHHSHRPRQERLARLPYYAAALPDVGLDGDPVGPPPAEDDGAAAEAYYGRIGNISVHIALNETRKIVNALLHRHGPILRLVMVETTRELKAGADERKRMIAEQAERERENAEIDVELRKSDRWMANARERRQRVRLARRQNNLCPYTSTPIGHADLLGDAYDIDHVIPLARGGRDSLDNMVLCQSDANKTKGDKTPWEAFHDKPGWIAQRDDFLARLDPQTAKALAWRFADDAGERVARKSAEDEDQGFLPRQLTDTGYIARVALRYLSLVTNEPNAVVATNGRLTGLLRLAWDITPGPAPRDLLPTPRDALRDDTAARRFLDGLTPPPLAKAVEGAVQARLAALGRSRVADAGLADALGLTLASLGGGGKNRADHRHHFIDAAMIAVTTRGLINQINQASGAGRILDLRKWPRTNFEPPYPTFRAEVMKQWDHIHPSIRPAHRDGGSLHAATVFGVRNRPDARVLVQRKPVEKLFLDANAKPLPADKIAEIIDGFASPRMAKRFKALLARYQAAHPEVPPALAALAVARDPAFGPRGMTANTVIAGRSDGDGEDAGLITPFRANPKAAVRTMGNAVYEVWEIQVKGRPRWTHRVLTRFDRTQPAPPPPPENARLVMRLRRGDLVYWPLESGDRLFLVKKMAVDGRLALWPARLATGKATALYAQLSCPNINLNGDQGYCVQSAEGIRKEKIRTTSCTALGRLRLSKKAT

SEQ ID NO: 32 - protein, 997 aa, Maritimibacter alkaliphilus
MKVLVDAGLMPSDPAAAKALETLDPYELRATGLDVMLPLTHLGRAVFHLNQRRGFKSNRKTDRGDNESGKIKDATKRLTWAMQEAGARTYGEFLHMRRARASDPRQVPSVRTRLSVASRGGPDSKEEAGYDFYPERAHLEDEFHALWSAQAAFHPDLTCELRDVVFEKIFYQRPLKEPKVGLCLFTAEERLPKAHPLTGRRVLYETVNQLRVTADGRTTRPLTLEERDMIVYALDNKKPVKSLSSMHLKLVALGKLVKLKDGERFTLESGVRDAIACDPIRATMGHPDGFGPAWSRLDWQAQWALIEKLRQVQSDDDFASLVAWLGATHNLSEDHAKRVANLHLPEGYGRLGLTATEAILCNLKAEVCTYSQAVERWGKHHSNQRTGECLEALPYYGEVLDRHVIPGTYNEDDDDVTRYGRITNPTVHIGLNQLRRLVNRIIATYGKPDQIVVELARELKQSEAQKSEALKKIRDTTADAIRRGRQLEEIGQKNTGANRLLLRLWEDLGPAVGPRCCPYTGKPISVTMLFDGACDVDHILPYSRTLDDSFANRTICLREANRQKGDRTPWEAWGGSDQWDAIEANLKDLPENKRKRFAPDAMERFEGERDFLDRALVDTQYLARISRAYLDTLFTEGGHVWVVPGRMTEMLRRHWGLNALLSDKDRGAGKVKNRTDHRHHAIDAAVIAATDHSLVNRISKAAGQGESAGQSAELIARDTPEPWEGFRNDISAQIARIVVSHRADHGRIDVEGRKHGKDSTAGRLHNDTAYGIVDDHTVVSRTPLLSLKPGDIEVTTKGKNIRDTQLQKALSVATTGKDGKGFEEALRNFAEKEGPYQGIRRVRLIETLQSSARVEVGSDEDGQPLKAYKGDSNHCYDLWKLPDGKVVPHVVSTYEAHAGTDKRPHPAAKRILRVFKKDMVAIEQDDQTAIFYVQKLDRANGLFLAPHLEANADARHRNPNDAFKFLQMGAGSVVRNKLRRVYVDEIGRIKDPGPPKH

SEQ ID NO: 33 - protein, 1027 aa, Blastopirellula marina
MFSESGDQPSLVDCGVRIFPEGVERDQQGGEKSKSQSRRVARGIRRQVRRRAQRLRHLKHALITTGLFPADVVDQQEVLASNPYELRSRALSEKLEPYEIGRILLHLAKRRGFLSNRTTDRSGGNELKGILAEMTQLQGEIAAHGCQTLGQYLHQLGDDGETFAQRLRGRHTLRAMYEDEFEKIWERQASYYPALLTEELRGGEEGKQSYPLVPTARRKSESLLKRFGLHGLLFFQRKMYWPKSVIGRCDLEPKEKRCPKADRLAQRFRILQEVNNLRLISPADRKEYTFAEFVGAGADKKLVDYLCEAKERTFPQIRKKFKLPETISFNYERGERSKLQGHETDAHFNGKKGLGKRRWSEIAEDVKDHIIQIVLEEDREDVALRKLTQDCSLTVEEAHKAMALHLPAGYSQYSRVAISRLLPHLELGKLLMGNDASDSAMHAAGYLRPDEREVRQYDLLPEPPDIPNPLVRQALYEVRKVINAIIREYGALGTIRVELAREAKKSAEQRTQIRIANAKRERENAAIAKTLQEMSPAIRPTRRNIQRYLLWKDQGGVCIYTGKVISQAQLFDSGEVDVDHILPRWRSLDDSMANKVIAHRSANNEKGDRTPWEWLGHDKPRFDELLLRAQRLPYGKRQRFIQKEVELTNFVERQLRDTTYVSRLVVQYLKGLGVPITTVKGPMTAELRHHWGLNALLNEDGSQKKNRSDHRHHAIDAIVIGLTDAKRLHALANARGKDLQPPWSEFRSDVATALGRMAVSHRVRRRIQGALHEETIYGPTQKAAQPTSTDQRPWAKDWIEDSQIVVRRKSVSDLTNTKHLAKIRDVTIRKILEDHLRRQKVDPTKPGVIPKDAFAGSNAPQMPSGVPIKKVRLVERGETWRKIGSGEASKFIKPGSNHHISYFAISRKGRESWKAHVTIMLDAACIAKESINNGKIVNRSIGDQGRFLMSLSIGEMFEITNNGGEILLCVVRKIDQSGRIYYKIHDDARESMDLKKDNLYMSPSKMQQFDARKVTVTPLGKIRNAND

SEQ ID NO: 34 - protein, 158 aa, Francisella tularensis
MIDFLLELDPCITIPPYLDNNNRKPPKCQSLILNPKFLDNQYPNWQQYLQELKKLQSIQDYLDSFETDLKDLKSSKDQPYFVEYKSSNQQMASGQRDYKDLDARILQFIFDRVKASDELLLSEIYFQAKKLKQKASSELEKLESSKKLDEVIANSQLS

SEQ ID NO: 35 - protein, 393 aa, Francisella tularensis
MNVKILPIAIDLDVKNTGVFSAFYQKGTSLEKLDNKNGKVYELSKDSYTLLMNNRTAQRHQRRGIDRKQLVKRLFKLVWTEQLNLEWDKDTQQAISFLFNRRGFSFITDGYSTEYLNIVPEQVKAILMDIFDDYNGEDDLDSYLKLATEQESKISEIYNKLMQKILEFKLRKLCTDIKDDKVSTKTLKEITSYEFELLADYLANYSESLKTQKFSYTDKQGNLKELSYYHHDKYNIQEFLKRHATINDEILDTLLTDDFDIWNFNFEKFDFDKNEEKLQSQEDKDHTQAYFHHFVFAVNKIKSEMASGGRHRSQYFQEITNVLDENNHQEGYLKNFCENLHNKKYSNLSVKNLVNLVGNLSNLELKPLRKYFNDKNLIIGMSKSLQKLIATGY

SEQ ID NO: 36 - protein, 1066 aa, Rhodopseudomonas palustris
MSERVVRRILGIDLGIASCGWGVVDISGAGGGIIATGVRCFDAPLIDKTGEPKSATRRTARGQRRIVRRRRQRMNGVRRLLCEFGLLPDPRPDALNQAMRRISTASAAAQVTPWTLRAAAHQRLLSNEELAVVLGHIARHRGFRSNAKNEAGANAADETSKMKKAMEATREGLAKYHAFGDMIANDPKFANRKRNRDKDYSHTAKRSDLEDEVRAILRAQLRFGSAAATETLAQTFADVAFFQRPLQDSEDRVGDCPFEPGQKRAARRAPSFELFRFLSRLANLKLAVGRSPERRLTAEEIALAAKGFGETKKTITFKSLREALDLDPNARFSGIGKDKEASLDVVARTGGAAYGTKTLKDALGDAPWRSLSRTPETLDRIAEILSFREDITSIRNGLEDLGLDSLVVEALMQAAANGDFKEFTRAGHISARAARNIIPGLREGLVYSEACARVGYDHAARLSVPLDQVGSPVTRKALSEALKQVRAVAREYGPIDYFHIELARSVGKSAEERKQLTDGIEARNVEKAKRRKQAEEHLGRAPSDDELLRYELAKEQNFKCIYSGDAIDPAGVAANDTRYQVDHILPWSRFGDDSYLNKTLCTARSNQNKRGRTPFEWFEADKTDVEWMEYVARVENLQEVKGRKKRNYSIKDAAAIEDKFKARNLTDTQWATRLLADELSRMFPPRECERAICGRADGGNDGLTIVEERRVFTRPGAITSKLRRAWGLEGLKKQDGKRVEDDRHHAVDALVLAATTESLLQRLTVEVQRREREGRPDDIFHCAEPWRGFRADVRRTVYGSETMPGIFVSRAERRRARGKAHDATIKQIREIEGERLVFERKPVEKLTDKDLEKIPIPKPYGQVSDPKRLRDELVESLRAWIAAGKPKDRPPLSPKGDVIRKVRIQTNDKVSVEINGGTVDRGDMARVDVFRKKNKKAVWEYYVVPIYPHQIVALNDPPDRAVIAYAEDKDWKEIDSSYEFLWSLFGLSYVEISKANGECIDGYFRGLHRGTGAASVCKHISLGKDATVSGIGLKTLASFKKFTIDRLGRKFEIPREVRTWRGEACT

SEQ ID NO: 37 - protein, 1149 aa, Lactobacillus salivarius
MERYHIGLDIGTSSIGWAVIGDDFKIKRKKGKNLIGVRLFKEGDTAAERRGFRTQRRRLNRRKWRLKLLEEIFDPYMAEVDKYFFARLKESNLSPKDSNKKYLGSLLFPDISDSNFYDKYPTIYHLRRDLMEKDKKFDLREIYLAIHHIVKYRGNFLEKVPAKNYKNSGASIGFLLEEVNDLYGNIIGNEDVAILDNDKFEDVEKIILNDEIRNIDKQKNVGRLLVKDKKEKNIVTAFSKAIFGYKFNLEDLLLIESDEKNKLTFNDENIDDIFNELSHSLNDNQMDLLTKTREIYFKFKLNMIVPTGYTISESMIEKYEMHKAHLKMYKEFINTLNAKDRKILKNAYSDYINNEKAKAANAQENFYKTVKKTIKENDSDTAKKIIGLIDEGNFMPKQRTGENGVIPHQLHQIELDRIIENQAKYYPWLAEENPVEKNRKFAKYKLDELVTFRVPYYVGPLIDKTESNKNEKETKFAWMVRKAKGTITPWNFENLVDRTESANRFIKRMTSKDTYIIGEDVLPASSLLYEKYKVLNELNNIKVNKKKLDVEQKQHVYLDLFTTRKNVTKDDLATSLNCDVESITGLTDNKKFNSSLSSYIDLKAILGNIVDDYSKNEDLEKIIEYSTIFEDGNIYKEKLSEISWLTDEQIEKLSNIHFKGWGRLSKKLLTQITNENGERIIDTLWNTSNNFIQVISDESIQAKLAEINGEYANKYNLEDILDEAYTSPQNKKAIRQVMKVVEDIEKAMKCEPTSIAIEFTREKRKSKLTNTRYKKISETYEKITDELISEYELGKLQSELDSKVNNMRDRYYLYFMQLGRDMYTGEKMNIDELHQKYDIDHILPQSFIKDDSLNNRVLTSKSVNIKEKSDKTAADLYAAKMGDFWRKLRKQGLMTEQKYKNLLTRTDSINKYTKQSFIKRQLVETSQVVKLAANILQDKYRNTKIIEIRARLNSDLRKKYELIKNREVNDYHHAIDGYLTTFVGQYLYKVYPKLRSYFVYDDFKKLDSNYLKHMDKFNFIWKLEDKKAEDVYDKVNDEFVLNVPEMKEYIRKIYNYKYMLVSKEVTTKNGAFYDQTKYNAKTINLIPIKKDKPTNIYGGYKGKVSSYMMLVKIQKKKEVIYKFVGVPRLWTDELDRLIDTDEKKALLKK

SEQ ID NO: 38 - protein, 1064 aa, Rhodopseudomonas palustris
MSECVTRRILGIDLGIASCGWGVIEVGEASGSIIASGVRCFDAPLIDKTGEPKSATRRTARGQRRIIRRRRQRMNAVRRLLAEFGVLTGRSPDALHQALLRLSQSVAGSQVTPWTLRAAAHERKLTNDELAVVLGHIARHRGFRSNSKNDGGANAADETSKMKKAMETTREGLARYHSFGAMIASDPKFADRKRNRDKDYSHTAKRSDLEDEVRTIFRSQTRFGSLVASEKLSQAFADAAFFQRPLQDSEDMVGSCPFEPGQKRTARRAPSFELFRFLSRLANLKLTVGRAPERRLTPDEIALAAKGFGETKKSITFKSLREALDLDPNARFSGVAKEKESTLDVAARTGGAAYGTKTLKDALGDAPWRSLSRMPEKLDRIAEILSFREDMKAIRNGLEEVGLDGLVVDALMQATANGDFKDFTRAAHISALAARNIIPGLREGLVYSDACTRVGYDHAARPAVPLSQIGSPVTRKALSEALKQVRAVAREYGPIDYFHIELARSIGKSAEERKKLTDGIEARNVEKEKRRKEAAEHLGRAPSDDELLRYELAKEQNFKCIYSGDPIDPAGISANDTRYQVDHILPWSRFGDDSYVNKTLCTARSNQNKRGRTPFEWFDADKTEAEWMEYSARVEDLKEVKGRKKRNYSIKDAASVEDKFKARNLTDTQWATRLLADELKRMFPPRECERVVTVRADGGNDGLSIVEERRVFTRPGAITSKLRRAWGLEGLKKQDGKRVEDDRHHAVDALVLAATTESLLNRLTVEVQQREREGRQDDIFHCSQPWPGFRVDVQRTVYGSETMPGIFVSRAERRRARGKAHDATVKQIRDIDGERIVFERKPIEKLTDKDLERIPVPEPYGKAADPKKLRDELVENLRAWIAAGKPKDKPPRSPKGDIIRKVRIETKDKVAVEINGGTVDRGDMARVDVFRKKNKKGVWEFYVIPIYPHQIVASALPPNRAVIAYKAESEWTAIDGCFEFAWSLNPMSYLELVKSNGELIEGYFRSMDRTTGAINLSPMSTNSETIRSIGVKTLSSFRKFTVDRLGRKFEIPREVRTWRGEACT

SEQ ID NO: 39 - protein, 1166 aa, Nitrobacter hamburgensis
MHVEIDFPHFSRGDSHLAMNKNEILRGSSVLYRLGLDLGSNSLGWFVTHLEKRGDRHEPVALGPGGVRIFPDGRDPQSGTSNAVDRRMARGARKRRDRFVERRKELIAALIKYNLLPDDARERRALEVLDPYALRKTALTDTLPAHHVGRALFHLNQRRGFQSNRKTDSKQSEDGAIKQAASRLATDKGNETLGVFFADMHLRKSYEDRQTAIRAELVRLGKDHLTGNARKKIWAKVRKRLFGDEVLPRADAPHGVRARATITGTKASYDYYPTRDMLRDEFNAIWAGQSAHHATITDEARTEIEHIIFYQRPLKPAIVGKCTLDPATRPFKEDPEGYRAPWSHPLAQRFRILSEARNLEIRDTGKGSRRLTKEQSDLVVAALLANREVKFDKLRTLLKLPAEARFNLESDRRAALDGDQTAARLSDKKGFNKAWRGFPPERQIAIVARLEETEDENELIAWLEKECALDGAAAARVANTTLPDGHCRLGLRAIKKIVPIMQDGLDEDGVAGAGYHIAAKRAGYDHAKLPTGEQLGRLPYYGQWLQDAVVGSGDARDQKEKQYGQFPNPTVHIGLGQLRRVVNDLIDKYGPPTEISIEFTRALKLSEQQKAERQREQRRNQDKNKARAEELAKFGRPANPRNLLKMRLWEELAHDPLDRKCVYTGEQISIERLLSDEVDIDHILPVAMTLDDSPANKIICMRYANRHKRKQTPSEAFGSSPTLQGHRYNWDDIAARATGLPRNKRWRFDANAREEFDKRGGFLARQLNETGWLARLAKQYLGAVTDPNQIWVVPGRLTSMLRGKWGLNGLLPSDNYAGVQDKAEEFLASTDDMEFSGVKNRADHRHHAIDGLVTALTDRSLLWKMANAYDEEHEKFVIEPPWPTMRDDLKAALEKMVVSHKPDHGIEGKLHEDSAYGFVKPLDATGLKEEEAGNLVYRKAIESLNENEVDRIRDIQLRTIVRDHVNVEKTKGVALADALRQLQAPSDDYPQFKHGLRHVRILKKEKGDYLVPIANRASGVAYKAYSAGENFCVEVFETAGGKWDGEAVRRFDANKKNAGPKIAHAPQWRDANEGAKLVMRIHKGDLIRLDHEGRARIMVVHRLDAAAGRFKLADHNETGNLDKRHATNNDIDPFRWLMASYNTLKKLAAVPVRVDELGRVWRVMPN

SEQ ID NO: 40 - protein, 641 aa, Nitrobacter hamburgensis
MHKRNSRSYRLGLDLGSNSLGWFVTHLEKRGDRYEPVALDPGGVRIFPDGRDPQSGMSNAVDRRMARGARKRRDRFVDPYALRKAALTNALPAHRVGRAIFHLNQRRGFQSNRKTDRKQSEDGAIKQAASKLKARMHEEAAPTLGAFFADMHLRKSYDDQQTAIRAELVRLGKDHLTGNARKKVWAKVRKRLFGDEVLRPKDTSDGARARATTTGTKASYDFYPTRAMLLDEFNAIWAAQREHHLAMTDEAKAEIEHIIFYHRPLKPAIVGKCTLDPATRPFKEDPEGYRAPWSHPLAQRFRILSEARNLEIRETGKTSRRLTKDQSDLVVAALLANREVKFDKLRTLLKLPAEARFNLESDRRSTATRPPHGCRTRRASIRRGAGFLRNGRSRSSPDWKKPKTKTNCSHGSKWNAHLTAQRPRASPIRRCRTAIAGSACAQSKRSCRSCRTSSMRMALRAPAITSWPSVPATTIPVDTFQQGGNAFGRILSVVTIELFAITDRVDPVQEQDARCFALRIAECRSDGLQHFAEVSLGLPPRNAAQDQRHSAGLCQSSCVGRFVPGTPCRRTPRSTSLHGKEPSAHAFGSTARSRPQLPASPRPCMSFRDGTSSSPARMPETLDRCAISRSNRSSVCRAERL

SEQ ID NO: 41 - protein, 1368 aa, Streptococcus pyogenes
MDKKYSIGLDIGTNSVGWAVITDDYKVPSKKFKVLGNTDRHSIKKNLIGALLFDSGEIAEATRLKRTARRRYTRRKNRICYLQEIFSNEMAKVDDSFFHRLEESFLVEEDKKHERHPIFGNIVDEVAYHEKYPTIYHLRKKLVDSTDKADLRLIYLALAHMIKFRGHFLIEGDLNPDNSDVDKLFIQLVQTYNQLFEENPINASGVDAKAILSARLSKSRRLENLIAQLPGEKKNGLFGNLIALSLGLTPNFKSNFDLAEDAKLQLSKDTYDDDLDNLLAQIGDQYADLFLAAKNLSDAILLSDILRLNSEITKAPLSASMIKRYDEHHQDLTLLKALVRQQLPEKYKEIFFDQSKNGYAGYIDGGASQEEFYKFIKPILEKMDGTEELLAKLNREDLLRKQRTFDNGSIPHQIHLGELHAILRRQEDFYPFLKDNREKIEKILTFRIPYYVGPLARGNSRFAWMTRKSEETITPWNFEEVVDKGASAQSFIERMTNFDKNLPNEKVLPKHSLLYEYFTVYNELTKVKYVTEGMRKPAFLSGEQKKAIVDLLFKTNRKVTVKQLKEDYFKKIECFDSVEISGVEDRFNASLGTYHDLLKIIKDKDFLDNEENEDILEDIVLTLTLFEDREMIEERLKTYAHLFDDKVMKQLKRRRYTVWGRLSRKLINGIRDKQSGKTILDFLKSDGFANRNFMQLIHDDSLTFKEDIQKAQVSGQGDSLHEHIANLAGSPAIKKGILQTVKVVDELVKVMGRHKPENIVIEMARENQTTQKGQKNSRERMKRIEEGIKELGSQILKEHPVENTQLQNEKLYLYYLQNGRDMYVDQELDINRLSDYDVDHIVPQSFIKDDSIDNKVLTRSDKNRGKSDNVPSEEVVKKMKNYWRQLLNAKLITQRKFDNLTKAERGGLSELDKAGFIKRQLVETRQITKHVAQILDSRMNTKYDENDKLIREVKVITLKSKLVSDFRKDFQFYKVREINNYHHAHDAYLNAVVGTALIKKYPKLESEFVYGDYKVYDVRKMLAKSEQEIGKATAKYFFYSNIMNFFKTEITLANGEIRKRPLIETNGETGEIVWDKGRDFATVRKVLSMPQVNIVKKTEVQTGGFSKESILPKRNSDKLIARKKDWDPKKYGGFDSPTVAYSVLVVAKVEKGKSKKLKSVKELLGITIMERSSFEKNPIDFLEAKGYKEVRKDLIIKLPKYSLFELENGRKRMLASAGELQKGNELALPSKYVNFLYLASHYEKLKGSPEDNEQKQLFVEQHKHYLDEIIEQISEFSKRVILADANLDKVLSAYNKHRDKPIREQAENIIHLFTLTNLGAPTAFKYFDTTIDRKRYTSTKEVLDATFIHQSITGLYETRIDLSQLGGD

SEQ ID NO: 42 - protein, 1368 aa, Streptococcus pyogenes
MDKKYSIGLDIGTNSVGWAVITDDYKVPSKKFKVLGNTDRHSIKKNLIGALLFDSGETAEATRLKRTARRRYTRRKNRICYLQEIFSNEMAKVDDSFFHRLEESFLVEEDKKHERHPIFGNIVDEVAYHEKYPTIYHLRKKLVDSTDKADLRLIYLALAHMIKFRGHFLIEGDLNPDNSDVDKLFIQLVQTYNQLFEENPINASGVDAKAILSARLSKSRRLENLIAQLPGEKKNGLFGNLIALSLGLTPNFKSNFDLAEDAKLQLSKDTYDDDLDNLLAQIGDQYADLFLAAKNLSDAILLSDILRLNSEITKAPLSASMIKRYDEHHQDLTLLKALVRQQLPEKYKEIFFDQSKNGYAGYIDGGASQEEFYKFIKPILEKMDGTEELLAKLNREDLLRKQRTFDNGSIPHQIHLGELHAILRRQEDFYPFLKDNREKIEKILTFRIPYYVGPLARGNSRFAWMTRKSEETITPWNFEEVVDKGASAQSFIERMTNFDKNLPNEKVLPKHSLLYEYFTVYNELTKVKYVTEGMRKPAFLSGEQKKAIVDLLFKTNRKVTVKQLKEDYFKKIECFDSVEISGVEDRFNASLGTYHDLLKIIKDKDFLDNEENEDILEDIVLTLTLFEDREMIEERLKTYAHLFDDKVMKQLKRRRYTGWGRLSRKLINGIRDKQSGKTILDFLKSDGFANRNFMQLIHDDSLTFKEDIQKAQVSGQGDSLHEHIANLAGSPAIKKGILQTVKVVDELVKVMGRHKPENIVIEMARENQTTQKGQKNSRERMKRIEEGIKELGSQILKEHPVENTQLQNEKLYLYYLQNGRDMYVDQELDINRLSDYDVDHIVPQSFIKDDSIDNKVLTRSDKNRGKSDNVPSEEVVKKMKNYWRQLLNAKLITQRKFDNLTKAERGGLSELDKAGFIKRQLVETRQITKHVAQILDSRMNTKYDENDKLIREVKVITLKSKLVSDFRKDFQFYKVREINNYHHAHDAYLNAVVGTALIKKYPKLESEFVYGDYKVYDVRKMIAKSEQEIGKATAKYFFYSNIMNFFKTEITLANGEIRKRPLIETNGETGEIVWDKGRDFATVRKVLSMPQVNIVKKTEVQTGGFSKESILPKRNSDKLIARKKDWDPKKYGGFDSPTVAYSVLVVAKVEKGKSKKLKSVKELLGLTIMERSSFEKNPIDFLEAKGYKEVKKDLIIKLPKYSLFELENGRKRMLASAGELQKGNELALPSKYVNFLYLASHYEKLKGSPEDNEQKQLFVEQHKHYLDEIIEQISEFSKRVILADANLDKVLSAYNKHRDKPIREQAENIIHLFTLTNLGAPAAFKYFDTTIDRKRYTSTKEVLDATLIHQSITGLYETRIDLSQLGGD

SEQ ID NO: 43 - protein, 1368 aa, Streptococcus pyogenes
MDKKYSIGLDIGTNSVGWAVITDDYKVPSKKFKVLGNTDRHSIKKNLIGALLFDSGEIAEATRLKRTARRRYTRRKNRICYLQEIFSNEMAKVDDSFFHRLEESFLVEEDKKHERHPIFGNIVDEVAYHEKYPTIYHLRKKLVDSTDKADLRLIYLALAHMIKFRGHFLIEGDLNPDNSDVDKLFIQLVQTYNQLFEENPINASGVDAKAILSARLSKSRRLENLIAQLPGEKKNGLFGNLIALSLGLTPNFKSNFDLAEDAKLQLSKDTYDDDLDNLLAQIGDQYADLFLAAKNLSDAILLSDILRLNSEITKAPLSASMIKRYDEHHQDLTLLKALVRQQLPEKYKEIFFDQSKNGYAGYIDGGASQEEFYKFIKPILEKMDGTEELLAKLNREDLLRKQRTFDNGSIPHQIHLGELHAILRRQEDFYPFLKDNREKIEKILTFRIPYYVGPLARGNSRFAWMTRKSEETITPWNFEEVVDKGASAQSFIERMTNFDKNLPNEKVLPKHSLLYEYFTVYNELTKVKYVTEGMRKPAFLSGEQKKAIVDLLFKTNRKVTVKQLKEDYFKKIECFDSVEISGVEDRFNASLGTYHDLLKIIKDKDFLDNEENEDILEDIVLTLTLFEDREMIEERLKTYAHLFDDKVMKQLKRRRYTGWGRLSRKLINGIRDKQSGKTILDFLKSDGFANRNFMQLIHDDSLTFKEDIQKAQVSGQGDSLHEHIANLAGSPAIKKGILQTVKVVDELVKVMGRHKPENIVIEMARENQTTQKGQKNSRERMKRIEEGIKELGSQILKEHPVENTQLQNEKLYLYYLQNGRDMYVDQELDINRLSDYDVDHIVPQSFIKDDSIDNKVLTRSDKNRGKSDNVPSEEVVKKMKNYWRQLLNAKLITQRKFDNLTKAERGGLSELDKAGFIKRQLVETRQITKHVAQILDSRMNTKYDENDKLIREVKVITLKSKLVSDFRKDFQFYKVREINNYHHAHDAYLNAVVGTALIKKYPKLESEFVYGDYKVYDVRKMLAKSEQEIGKATAKYFFYSNIMNFFKTEITLANGEIRKRPLIETNGETGEIVWDKGRDFATVRKVLSMPQVNIVKKTEVQTGGFSKESILPKRNSDKLIARKKDWDPKKYGGFDSPTVAYSVLVVAKVEKGKSKKLKSVKELLGITIMERSSFEKNPIDFLEAKGYKEVRKDLIIKLPKYSLFELENGRKRMLASAGELQKGNELALPSKYVNFLYLASHYEKLKGSPEDNEQKQLFVEQHKHYLDEIIEQISEFSKRVILADANLDKVLSAYNKHRDKPIREQAENIIHLFTLTNLGAPTAFKYFDTTIDRKRYTSTKEVLDATFIHQSITGLYETRIDLSQLGGD

SEQ ID NO: 44 - protein, 1371 aa, Streptococcus pyogenes
MDKKYSIGLDIGTNSVGWAVITDDYKVPSKKFKVLGNTDRHSIKKNLIGALLFDSGETAEATRLKRTARRRYTRRKNRICYLQEIFSNEMAKVDDSFFHRLEESFLVEEDKKHERHPIFGNIVDEVAYHEKYPTIYHLRKKLADSTDKADLRLIYLALAHMIKFRGHFLIEGDLNPDNSDVDKLFIQLVQTYNQLFEENPINASRVDAKAILSARLSKSRRLENLIAQLPGEKKNGLFGNLIALSLGLTPNFKSNFDLAEDAKLQLSKDTYDDDLDNLLAQIGDQYADLFLAAKNLSDATLLSDILRVNSEITKAPLSASMIKRYDEHHQDLTLLKALVRQQLPEKYKEIFFDQSKNGYAGYIDGGASQEEFYKFIKPILEKMDGTEELLAKLNREDLLRKQRTFDNGSIPHQIHLGELHAILRRQEDFYPFLKDNREKIEKILTFRIPYYVGPLARGNSRFAWMTRKSEETITPWNFEEVVDKGASAQSFIERMTNFDKNLPNEKVLPKHSLLYEYFTVYNELTKVKYVTEGMRKPAFLSGEQKKAIVDLLFKTNRKVTVKQLKEDYFKKIECFDSVEISGVEDRFNASLGTYHDLLKIIKDKDFLDNEENEDILEDIVLTLTLFEDKEMIEERLKTYAHLFDDKVMKQLKRRHYTGWGRLSRKLINGIRDKQSGKTILDFLKSDGFANRNFIQLIHDDSLTFKEAIQKAQVSGQGHSLHEQIANLAGSPAIKKGILQSVKVVDELVKVMGHKPENIVIEMARENQTTQKGQKNSRERMKRIEEGIKELGSQILKEHPVENTQLQNEKLYLYYLQNGRDMYVDQELDINRLSDYDVDHIVPQSFIKDDSIDNKVLTRSDKNRGKSDDVPSEEVVKKMKNYWRQLLNAKLITQRKFDNLTKAERGGLSELDKAGFIKRQLVETRQITKHVAQILDSRMNTKYDENDKLIREVKVITLKSKLVSDFRKDFQFYKVREINNYHHAHDAYLNAVVGTALIKKYPKLESEFVYGDYKVYDVRKMIAKSEQEIGKATAKRFFYSNIMNFFKTEITLANGEIRKRPLIETNEETGEIVWDKGRDFATVRKVLSMPQVNIVKKTEVQTGALTNESIYARGSFDKLISRKHRFESSKYGGFGSPTVTYSVLVVAKSKVQDGKVKKIKTGKELIGITLLDKLVFEKNPLKFIEDKGYGNVQIDKCIKLPKYSLFEFENGTRRMLASVMANNNSRGDLQKANEMFLPAKLVTLLYHAHKIESSKELEHEAYILDHYNDLYQLLSYIERFASLYVDVEKNISKVKELFSNIESYSISEICSSVINLLTLTASGAPADFKFLGTTIPRKRYGSPQSILSSTLIHQSITGLYETRIDLSQLGSD

SEQ ID NO: 45 - protein, 1121 aa, Streptococcus thermophilus
MSDLVLGLDIGIGSVGVGILNKVTGEIIHKNSRIFPAAQAENNLVRRTNRQGRRLARRKKHRRVRLNRLFEESGLITDFTKISINLNPYQLRVKGLTDELSNEELFIALKNMVKHRGISYLDDASDDGNSSVGDYAQIVKENSKQLETKTPGQIQLERYQTYGQLRGDFTVEKDGKKHRLINVFPTSAYRSEALRILQTQQEFNPQITDEFINRYLEILTGKRKYYHGPGNEKSRTDYGRYRTSGETLDNIFGILIGKCTFYPDEFRAAKASYTAQEFNLLNDLNNLTVPTETKKLSKEQKNQIINYVKNEKAMGPAKLFKYIAKLLSCDVADIKGYRIDKSGKAEIHTFEAYRKMKTLETLDIEQMDRETLDKLAYVLTLNTEREGIQEALEHEFADGSFSQKQVDELVQFRKANSSIFGKGWHNFSVKLMMELIPELYETSEEQMTILTRLGKQKTTSSSNKTKYIDEKLLTEEIYNPVVAKSVRQAIKIVNAAIKEYGDFDNIVIEMARETNEDDEKKAIQKIQKANKDEKDAAMLKAANQYNGKAELPHSVFHGHKQLATKIRLWHQQGERCLYTGKTISIHDLINNSNQFEVDHILPLSITFDDSLANKVLVYATANQEKGQRTPYQALDSMDDAWSFRELKAFVRESKTLSNKKKEYLLTEEDISKFDVRKKFIERNLVDTRYASRVVLNALQEHFRAHKIDTKVSVVRGQFTSQLRRHWGIEKTRDTYHHHAVDALIIAASSQLNLWKKQKNTLVSYSEDQLLDIETGELISDDEYKESVFKAPYQHFVDTLKSKEFEDSILFSYQVDSKFNRKISDATIYATRQAKVGKDKADETYVLGKIKDIYTQDGYDAFMKIYKKDKSKFLMYRHDPQTFEKVIEPILENYPNKQINEKGKEVPCNPFLKYKEEHGYIRKYSKKGNGPEIKSLKYYDSKLGNHIDITPKDSNNKVVLQSVSPWRADVYFNKTTGKYEILGLKYADLQFEKGTGTYKISQEKYNDIKKKEGVDSDSEFKFTLYKNDLLLVKDTETKEQQLFRFLSRTMPKQKHYVELKPYDKQKFEGGEALIKVLGNVANSGQCKKGLGKSNISIYKVRTDVLGNQHIIKNEGDKPKLDF

SEQ ID NO: 46 - protein, 1388 aa, Streptococcus thermophilus
MTKPYSIGLDIGTNSVGWAVTTDNYKVPSKKMKVLGNTSKKYIKKNLLGVLLFDSGITAEGRRLKRTARRRYTRRRNRILYLQEIFSTEMATLDDAFFQRLDDSFLVPDDKRDSKYPIFGNLVEEKAYHDEFPTIYHLRKYLADSTKKADLRLVYLALAHMIKYRGHFLIEGEFNSKNNDIQKNFQDFLDTYNAIFESDLSLENSKQLEEIVKDKISKLEKKDRILKLFPGEKNSGIFSEFLKLIVGNQADFRKCFNLDEKASLHFSKESYDEDLETLLGYIGDDYSDVFLKAKKLYDAILLSGFLTVTDNETEAPLSSAMIKRYNEHKEDLALLKEYIRNISLKTYNEVFKDDTKNGYAGYIDGKTNQEDFYVYLKKLLAEFEGADYFLEKIDREDFLRKQRTFDNGSIPYQIHLQEMRAILDKQAKFYPFLAKNKERIEKILTFRIPYYVGPLARGNSDFAWSIRKRNEKITPWNFEDVIDKESSAEAFINRMTSFDLYLPEEKVLPKHSLLYETFNVYNELTKVRFIAESMRDYQFLDSKQKKDIVRLYFKDKRKVTDKDIIEYLHAIYGYDGIELKGIEKQFNSSLSTYHDLLNIINDKEFLDDSSNEAIIEEIIHTLTIFEDREMIKQRLSKFENIFDKSVLKKLSRRHYTGWGKLSAKLINGIRDEKSGNTILDYLIDDGISNRNFMQLIHDDALSFKKKIQKAQIIGDEDKGNIKEVVKSLPGSPAIKKGILQSIKIVDELVKVMGGRKPESIVVEMARENQYTNQGKSNSQQRLKRLEKSLKELGSKILKENIPAKLSKIDNNALQNDRLYLYYLQNGKDMYTGDDLDIDRLSNYDIDHIIPQAFLKDNSIDNKVLVSSASNRGKSDDVPSLEVVKKRKTFWYQLLKSKLISQRKFDNLTKAERGGLSPEDKAGFIQRQLVETRQITKHVARLLDEKFNNKKDENNRAVRTVKIITLKSTLVSQFRKDFELYKVREINDFHHAHDAYLNAVVASALLKKYPKLEPEFVYGDYPKYNSFRERKSATEKVYFYSNIMNIFKKSISLADGRVIERPLIEVNEETGESVWNKESDLATVRRVLSYPQVNVVKKVEEQNHGLDRGKPKGLFNANLSSKPKPNSNENLVGAKEYLDPKKYGGYAGISNSFTVLVKGTIEKGAKKKITNVLEFQGISILDRINYRKDKLNFLLEKGYKDIELIIELPKYSLFELSDGSRRMLASILSTNNKRGEIHKGNQIFLSQKFVKLLYHAKRISNTINENHRKYVENHKKEFEELFYYILEFNENYVGAKKNGKLLNSAFQSWQNHSIDELCSSFIGPTGSERKGLFELTSRGSAADFEFLGVKIPRYRDYTPSSLLKDATLIHQSVTGLYETRIDLAKLGEG

SEQ ID NO: 47 - protein, 1138 aa, Acidothermus cellulolyticus
MGGSEVGTVPVTWRLGVDVGERSIGLAAVSYEEDKPKEILAAVSWIHDGGVGDERSGASRLALRGMARRARRLRRFRRARLRDLDMLLSELGWTPLPDKNVSPVDAWLARKRLAEEYVVDETERRRLLGYAVSHMARHRGWRNPWTTIKDLKNLPQPSDSWERTRESLEARYSVSLEPGTVGQWAGYLLQRAPGIRLNPTQQSAGRRAELSNATAFETRLRQEDVLWELRCIADVQGLPEDVVSNVIDAVFCQKRPSVPAERIGRDPLDPSQLRASRACLEFQEYRIVAAVANLRIRDGSGSRPLSLEERNAVIEALLAQTERSLTWSDIALEILKLPNESDLTSVPEEDGPSSLAYSQFAPFDETSARIAEFIAKNRRKIPTFAQWWQEQDRTSRSDLVAALADNSIAGEEEQELLVHLPDAELEALEGLALPSGRVAYSRLTLSGLTRVMRDDGVDVHNARKTCFGVDDNWRPPLPALHEATGHPVVDRNLAILRKFLSSATMRWGPPQSIVVELARGASESRERQAEEEAARRAHRKANDRIRAELRASGLSDPSPADLVRARLLELYDCHCMYCGAPISWENSELDHIVPRTDGGSNRHENLAITCGACNKEKGRRPFASWAETSNRVQLRDVIDRVQKLKYSGNMYWTRDEFSRYKKSVVARLKRRTSDPEVIQSIESTGYAAVALRDRLLSYGEKNGVAQVAVFRGGVTAEARRWLDISIERLFSRVAIFAQSTSTKRLDRRHHAVDAVVLTTLTPGVAKTLADARSRRVSAEFWRRPSDVNRHSTEEPQSPAYRQWKESCSGLGDLLISTAARDSIAVAAPLRLRPTGALHEETLRAFSEHTVGAAWKGAELRRIVEPEVYAAFLALTDPGGRFLKVSPSEDVLPADENRHIVLSDRVLGPRDRVKLFPDDRGSIRVRGGAAYIASFHHARVFRWGSSHSPSFALLRVSLADLAVAGLLRDGVDVFTAELPPWTPAWRYASIALVKAVESGDAKQVGWLVPGDELDFGPEGVTTAAGDLSMFLKYFPERHWVVTGFEDDKRINLKPAFLSAEQAEVLRTERSDRPDTLTEAGEILAQFFPRCWRATVAKVLCHPGLTVIRRTALGQPRWRRGHLPYSWRPWSADPWSGGTP

SEQ ID NO: 48 - protein, 1629 aa, Francisella tularensis
  source 1..1629: note = Francisella tularensis subsp. novicida
MNFKILPIAIDLGVKNTGVFSAFYQKGTSLERLDNKNGKVYELSKDSYTLLMNNRTARRHQRRGIDRKQLVKRLFKLIWTEQLNLEWDKDTQQAISFLFNRRGFSFITDGYSPEYLNIVPEQVKAILMDIFDDYNGEDDLDSYLKLATEQESKISEIYNKLMQKILEFKLMKLCTDIKDDKVSTKTLKEITSYEFELLADYLANYSESLKTQKFSYTDKQGNLKELSYYHHDKYNIQEFLKRHATINDRILDTLLTDDLDIWNFNFEKFDFDKNEEKLQNQEDKDHIQAHLHHFVFAVNKIKSEMASGGRHRSQYFQEITNVLDENNHQEGYLKNFCENLHNKKYSNLSVKNLVNLIGNLSNLELKPLRKYFNDKIHAKADHWDEQKFTETYCHWILGEWRVGVKDQDKKDGAKYSYKDLCNELKQKVTKAGLVDFLLELDPCRTIPPYLDNNNRKPPKCQSLILNPKFLDNQYPNWQQYLQELKKLQSIQNYLDSFETDLKVLKSSKDQPYFVEYKSSNQQIASGQRDYKDLDARILQFIFDRVKASDELLLNEIYFQAKKLKQKASSELEKLESSKKLDEVIANSQLSQILKSQHTNGIFEQGTFLHLVCKYYKQRQRARDSRLYIMPEYRYDKKLHKYNNTGRFDDDNQLLTYCNHKPRQKRYQLLNDLAGVLQVSPNFLKDKIGSDDDLFISKWLVEHIRGFKKACEDSLKIQKDNRGLLNHKINIARNTKGKCEKEIFNLICKIEGSEDKKGNYKHGLAYELGVLLFGEPNEASKPEFDRKIKKFNSIYSFAQIQQIAFAERKGNANTCAVCSADNAHRMQQIKITEPVEDNKDKIILSAKAQRLPAIPTRIVDGAVKKMATILAKNIVDDNWQNIKQVLSAKHQLHIPIITESNAFEFEPALADVKGKSLKDRRKKALERISPENIFKDKNNRIKEFAKGISAYSGANLTDGDFDGAKEELDHIIPRSHKKYGTLNDEANLICVTRGDNKNKGNRIFCLRDLADNYKLKQFETTDDLEIEKKIADTIWDANKKDFKFGNYRSFINLTPQEQKAFRHALFLADENPIKQAVIRAINNRNRTFVNGTQRYFAEVLANNIYLRAKKENLNTDKISFDYFGIPTIGNGRGIAEIRQLYEKVDSDIQAYAKGDKPQASYSHLIDAMLAFCIAADEHRNDGSIGLEIDKNYSLYPLDKNTGEVFTKDIFSQIKITDNEFSDKKLVRKKAIEGFNTHRQMTRDGIYAENYLPILIHKELNEVRKGYTWKNSEEIKIFKGKKYDIQQLNNLVYCLKFVDKPISIDIQISTLEELRNILTTNNIAATAEYYYINLKTQKLHEYYIENYNTALGYKKYSKEMEFLRSLAYRSERVKIKSIDDVKQVLDKDSNFIIGKITLPFKKEWQRLYREWQNTTIKDDYEFLKSFFNVKSITKLHKKVRKDFSLPISTNEGKFLVKRKTWDNNFIYQILNDSDSRADGTKPFIPAFDISKNEIVEAIIDSFTSKNIFWLPKNIELQKVDNKNIFAIDTSKWFEVETPSDLRDIGIATIQYKIDNNSRPKVRVKLDYVIDDDSKINYFMNHSLLKSRYPDKVLEILKQSTIIEFESSGFNKTIKEMLGMKLAGIYNETSNN

SEQ ID NO: 49 - protein, 1068 aa, Verminephrobacter eiseniae
MNKAVAYRLALDLGSTSLGWAIFRLNEAREPTAIIRAGVRIFSDGRNANSEPLAVHRRVARAMRRRRDRLLKRKKRMHDQLVQHGFFPAEVAERKELERLNPYQLRAKGLHEALTPGEFARALFHINQRRGFKSNRKTDRKDNDSGALKQAISELRKRIQDSDCATAGEWFWKERMQQKPEGVRGQWVRARYRKTPSTTDEGKKRIGYDLYVDRAMVEQEFDALWAAQAALQPGLFTEAARAELKDTLLYQRDLRPVKPGRCTLLPAEERAPLALPSTQRFRILQEVNNLRLLDEALREVPLNLAQRDAVVSALEGKKELSFAAIRKLLTLSGKFNLEDEKRAELKGNATSVILARKDLFGDAWAGFDAAVQDEIVWRLVSQESEGALIAWLQQHTGVDGVCAEAIVNTRLPDGYGRLSRKALERIVPALQREVCTYDKAVQAAGFAHHSDLGFDFDYAEDEVQQVGEHTIASTGEVQAQYAFKQLPYYGKALQRHVAFGSGDAKDHEEKCYGKIANPTVHIGLNQVRTVVNALIRRYGHPTEVVVELARDLKQSREQKQQTQREQADNQKRNEDIRKRIAPILETSPERVRDRDIKKWILWEELNKKDIADRHCPYSGERISATMLLSEAVEIEHILPFSRTLDDSLNNRTVAMRRANRIKGDRTPWEARADFEAQGWRYEAILQRAEGMPPRKRYRFAEDGYQRWLGKDRNFLARALNDTSYLSRLAANYLRLVCPQGVRVIPGQMTDKLRGKFGLNSVLGLDGKKNRNDHRHHAVDACVIGVTDQGLMQRFANASKQARENGLTRLVQDMLLPWWPSYYDHVERAVRHIRVSHRPDHGFEGAMMKGTAHGIREDGIREDGRIKQRPKAKGSADHKTITLIPIDEPRQLARHGVDAEGKPLPYKGYASGSNYCIEITKNGKGKWEGQVISTFDAYRIKAAADAAARAGQVISTVEADSIVRKSGWERLRGAQSQNGQPLVMRLVIGDSVRMEVDGRDEVMRVVKMSGKEMVFAPVREANVDKRNNMPDEQDPFTYTYKRADQLRKAKARQVTISPIGELRDPGFKG

SEQ ID NO: 50 - protein, 1125 aa, Francisella tularensis
MNVKILPIAIDLDVKNTGVFSAFYQKGTSLEKLDNKNGKVYELSKDSYTLLMNNRTARRHQRRGIDRKQLVKRLFKLVWTEQLNLEWDKDTQQAISFLFNRRGFSFITDGYSTEYLNIVPEQVKAILMDIFDDYNGEDDLDSYLKLATEQESKISEIYNKLMQKILEFKLRKLCTDIKDDKVSTKTLKEITSYEFELLADYLANYSESLKIQKFSYTDKQGNLKELSYYHHDKYNIQEFLKRHATINDEILDTLLTDDFDIWNFNFEKFDFDKNEEKLQNQEDKDHTQAHLHHFVFAVNKIKSEMASGGRHRSQYFQEITNVLDENNHQEGYLKNFCENLHNKKYSNLSVKNLVNLVGNLSNLELKPLRKYFNDKIHAKADHWDEQKFTETYCHWILGEWRVGVKDQDKKDGAKYSYKDLCNELKQKVTKAGLIDFLLELDPCRTIPPYLDNNNRKPPKCQSLILNPKFLDNQYPNWQQYLQELKKLQSIQDYLDSFETDLKDLKSSKDQPYFVEYKSSNQQMASGQRDYKDLDARILQFIFDRVKASDELLLNEIYFQAKKLKQKASSELEKLESSKKLDEVIANSQLSQILKSQHTNGIFEQGTFLHLVCKYYKQRQRARDSRLYIMPEYRYDKKLDKYNNTGRFDDNNQLLTYCNHKPRQKRYQLLNDLAGVLQVSRNQLLSSVEEWFQQAQRVGEISKSQDEQIFEWLKSFKIASYCKAAVEMQKQYRGTLKNAIQTAIFRQSENINKNKNKNTGNQQQALSENSKDVKSLTADEKKLLKLIENIAKASQKIGESLGLNDKQIKKFNSIYSFAQIQQIAFAERKGNANTCAVCSADNAHRMQQIKITELVEDNKDNIILSAKAQRLPAIPTRIVDGAVKKMATILAKNIVDDNWQNIKQVLSAKHQLHIPIITESNAFEFEPALADVKGKSLKDRRKKALERISPENIFKDKNNRIKEFAKGISAYSGANLTDGDFDGAKEELDHIIPRSHKKYGTLNDEANLICVTRDDNKNIFAIDTSKWFEIETPSDLRDIGVATIQYKIDNNSRPKVRVKLDYVIDDDSKINYFMNHSLLKSRYPDKVLEILKQSTIIEFESSGFNKTIKEMLGMTLAGIYNETSNN

SEQ ID NO: 51 - protein, 1064 aa, Bradyrhizobium sp.
MKRTSLRAYRLGVDLGANSLGWFVVWLDDHGQPEGLGPGGVRIFPDGRNPQSKQSNAAGRRLARSARRRRDRYLQRRGKLMGLLVKHGLMPADEPARKRLECLDPYGLRAKALDEVLPLHHVGRALFHLNQRRGLFANRAIEQGDKDASAIKAAAGRLQTSMQACGARTLGEFLNRRHQLRATVRARSPVGGDVQARYEFYPTRAMVDAEFEAIWAAQAPHHPTMTAEAHDTIREAIFSQRAMKRPSIGKCSLDPATSQDDVDGFRCAWSHPLAQRFRIWQDVRNLAVVETGPTSSRLGKEDQDKVARALLQTDQLSFDEIRGLLGLPSDARFNLESDRRDHLKGDATGAILSARRHFGPAWHDRSLDRQIDIVALLESALDEAAIIASLGTTHSLDEAAAQRALSALLPDGYCRLGLRAIKRVLPLMEAGRTYAEAASAAGYDHALLPGGKLSPTGYLPYYGQWLQNDVVGSDDERDTNERRWGRLPNPTVHIGIGQLRRVVNELIRWHGPPAEITVELTRDLKLSPRRLAELEREQAENQRKNDKRTSLLRKLGLPASTHNLLKLRLWDEQGDVASECPYTGEAIGLERLVSDDVDIDHLIPFSISWDDSAANKVVCMRYANREKGNRTPFEAFGHRQGRPYDWADIAERAARLPRGKRWRFGPGARAQFEELGDFQARLLNETSWLARVAKQYLAAVTHPHRIHVLPGRLTALLRATWELNDLLPGSDDRAAKSRKDHRHHAIDALVAALTDQALLRRMANAHDDTRRKIEVLLPWPTFRIDLETRLKAMLVSHKPDHGLQARLHEDTAYGTVEHPETEDGANLVYRKTFVDISEKEIDRIRDRRLRDLVRAHVAGERQQGKTLKAAVLSFAQRRDIAGHPNGIRHVRLTKSIKPDYLVPIRDKAGRIYKSYNAGENAFVDILQAESGRWIARATTVFQANQANESHDAPAAQPIMRVFKGDMLRIDHAGAEKFVKIVRLSPSNNLLYLVEHHQAGVFQTRHDDPEDSFRWLFASFDKLREWNAELVRIDTLGQPWRRKRGLETGSEDATRIGWTRPKKWP

SEQ ID NO: 52 - protein, 1354 aa, Flavobacterium psychrophilum
MKKILGLDLGTNSIGWAFINEAENEIEVSSIVNTGVRIVPLTTDEESDFKKGNTISINADRTLKRGARRGLQRFKQRREALLETFNRIKFIATDFVYAETGAATTFSSYQLRAKSAVEAVTKEELVKVLLMLNKKRGYKSSRKAKTAEEGDAIDGMKIAKEIFENNLTPGQWVYNSLSKGGKFIPDFYHSDLQKELEKIVRFQNQFHSEQINDKLLADIQGKSRTQTSQHFSKTLNIPLAENKGTREETKLQHYQWRNEALANELDMKILAFIITEINNQINQSSGYLGAISDRSKELYFNQETVGQYQYKQLQENVHAKLKNQVFYRQDYLDEFEKIWETQAKFHSELNEKLKAEIRDITIFYQRKLKSQKHLVSFCEFEKGHKAIPKSSPLFQEFRIWQNLNNVVVKNETTKEVFELSEELKQLIAEELQFKESMTDVQMLTFCELKKGTHTVNFKKIEGNRTNTSIYKAFEKILEVEGYEIDFSKMKPLEIKETVAPIFETLNINTVILDFDPTIQGNDFDKQPYYQLWHLLYSAEDDDKLKETLKTKFGFKENHLPFILNINLQADYGSLSAKAIKKILPHLMDGHIYDKACLMVGYNHSSSLTTAQNNDRVLKDTLELLKKNSLRNPVVEKILNQMINVINAIMKDPAMGKPDEIRVELARELKANNEQRKKATSDINTATTEHERIRKLLHSEFNIPRVTRNDIIRYKLWLETGGISLYTGNPIKASDLFSKNYDIEHIIPKSRLFDDSFSNKTLCERQLNIDKSNKTAYSFLQEKLSENDFAAYENRVKDLFKTGKIKSYTKYKKLLMADNEIPEGFIDRQLRETQYIAKKAKEILLEVSRNVTATIGSVTDKLRQDWELVDVMKELNWEKYDKLGLTHIEEGKNGERLSKIKDWTKRNDHRHHAMDAITVAFTKPAYIQYLNNLNAKTQGENKANSIIGIENKHLYRDKNNKLRFISPMKNFREEAKKQLESILISYKAKNKVVTKNKNTTKKSGGTNQKIQLTPRGRLHKETVYGKLQQYATKEEKVNASFTEDYIQKVAKKEYREALLKRLEENDNDPKKAFTGKNALNKTPIYISLKDNIIVPEKVKTVWLETDYTIRKDITPDLKIDKVIDVGIKRILQNRLNEFNGDPKKAFVNLGESPIWLNKEKGIAIKRVTISGVSNAQALHTKKDHLGNEILDKNGNPIPVDFISTGNNHHVAIYRDEKGNLQEEVVSFYDAVIRRNLGLSVINKNHEKGWEFLFSMKQNEFFIFPSDGFNPHEIDLLNPNNYHLISPNIFRVQKISTKNYMFNHHLETKAVDGEMLKSKKELSKTSYHFIQTPTNLNGIIKVRINHLGKIVHLGEY

SEQ ID NO: 53 - protein, 1062 aa, Actinobacillus succinogenes
MNLNYILGLDLGIASVGWAVVEIDEQENPQRLIDVGVRTFDRAEVLKTGESLALARRLARSSRRLVKRRAERIKKAKRLLKAENLLLSADEILPNEAWQLRVKGLDQKLERQEWAAVLLHLLKHRGYLSQRKNESKSENKELGALLSGVAINHQILQSAEYRTPAEIAVNKFQAEEGHIRNQRGAYTHTFSRLDLLAEMELLFQRQATLGNPHTSTKLLENLTALLMWQKPALAGEAILKMLGKCTFEPTEYKAAKNSYSAERFVWLTKLNNLRILEQGAERALTDNERFALLDQPYEKAKLTYAQVRTLLGLSDEAIFKGLRYQGEDKKAVETKTTLMEVKAYHQIRKALEGLDLKAEWNELKNNPALLDEIGTAFSLYKTDDDIHRYLDGKLSESVLNALLENLNFDKFIQLSLKALQQILPLMLQGQRYDEAVSAIYGDHYGKKSDEIDRLLPNIPTDEIRNPVVLRTLTQARKVINAVVRLYGSPARIHIETGREVGKSYQDRKKLEKQQEENRKQRENAVKKFKEYFPNFVGEPKGKDILKMRLYELQQAKCLYSGKSLELYRLLEKGYVEVDHALPFSRTWDDSFNNKVLVLANENQNKGNATPYEWLDGKNNSEGWQHFVARVQTSGFSYAKKQRVLIQELDEKSFIERNLNDTRYVARFLCNHIADNMLLTGKGKRKVFASNGQITALLRGCWGLQKVRENNDRHHALDAVVVACSTKSMQDKITKFVKYKEGRLFKDKKDGVYKGERINRETGEIISLHFPTPWKFFKENVEIRIFSENPKLELENRLPDYPQYNHEFVQPLFVSRMPTRKMTGQGHMETVKSAKRLDKGLSVLKVPLTQLKLSDLERMVNREREMALYEALKECLEQFGNDPAKAFAEPFYKKGGALVKAVRVEQTQKSGVLVRNGNGVADNATGSIVRVDVFTKGGKYFLVPIYTWQVAKGILPNKAVIQGKDESEWEEMDENAVFQFSMHKNDLIKVKTKKGEIFGYFNGLDRATGSIEIEEHDLEKSKGKNGSHRGLGVKTAFFLEKYQVDELGKNIRPCRPTKRQHVR

SEQ ID NO: 54 - protein, 1340 aa, Dorea longicatena
MEQEYYLGLDMGTGSVGWAVTDSEYHVLRKHGKALWGVRLFESASTAEERRMFRTSRRRLDRRNWRIEILQEIFAEEISKKDPGFFLRMKESKYYPEDKRDINGNCPELPYALFVDDDFTDKDYHKKFPTIYHLRKMLMNTEETPDIRLVYLAIHHMMKHRGHFLLSGDINEIKEFGTTFSKLLENIKNEELDWNLELGKEEYAVVESILKDNMLNRSTKKTRLIKALKAKSICEKAVLNLLAGGTVKLSDIFGLEELNETERPKISFADNGYDDYIGEVENELGEQFYIIETAKAVYDWAVLVEILGKYTSISEAKVATYEKHKSDLQFLKKIVRKYLTKEEYKDIFVSTSDKLKNYSAYIGMTKINGKKVDLQSKRCSKEEFYDFIKKNVLKKLEGQPEYEYLKEELERETFLPKQVNRDNGVIPYQIHLYELKKILGNLRDKIDLIKENEDKLVQLFEFRIPYYVGPLNKIDDGKEGKFTWAVRKSNEKIYPWNFENVVDIEASAEKFIRRMTNKCTYLMGEDVLPKDSLLYSKYMVLNELNNVKLDGEKLSVELKQRLYTDVFCKYRKVTVKKIKNYLKCEGIISGNVEITGIDGDFKASLTAYHDFKEILTGTELAKKDKENIITNIVLFGDDKKLLKKRLNRLYPQITPNQLKKICALSYTGWGRFSKKFLEEITAPDPETGEVWNIITALWESNNNLMQLLSNEYRFMEEVETYNMGKQTKTLSYETVENMYVSPSVKRQIWQTLKIVKELEKVMKESPKRVFIEMAREKQESKRTESRKKQLIDLYKACKNEEKDWVKELGDQEEQKLRSDKLYLYYTQKGRCMYSGEVIELKDLWDNTKYDIDHIYPQSKTMDDSLNNRVLVKKKYNATKSDKYPLNENIRHERKGFWKSLLDGGFISKEKYERLIRNTELSPEELAGFIERQIVETRQSTKAVAEILKQVFPESEIVYVKAGTVSRFRKDFELLKVREVNDLHHAKDAYLNIVVGNSYYVKFTKNASWFIKENPGRTYNLKKMFTSGWNIERNGEVAWEVGKKGTIVTVKQIMNKNNILVTRQVHEAKGGLFDQQIMKKGKGQIAIKETDERLASIEKYGGYNKAAGAYFMLVESKDKKGKTIRTIEFIPLYLKNKIESDESIALNFLEKGRGLKEPKILLKKIKIDTLFDVDGFKMWLSGRTGDRLLFKCANQLILDEKIIVTMKKIVKFIQRRQENRELKLSDKDGIDNEVLMEIYNTFVDKLENTVYRIRLSEQAKTLIDKQKEFERLSLEDKSSTLFEILHIFQCQSSAANLKMIGGPGKAGILVMNNNISKCNKISIINQSPTGIFENEIDLLKI

SEQ ID NO: 55 - protein, 984 aa, Campylobacter jejuni
MAKILAFDIGISSIGWAFSENDELKDCGVRIFTKAENPKTGESLALPRRIARSARKRLARRKARLNHLKHLIANEFKLNYEDYQSFDEILAKAYKGSLISPYELRFRALNELLSKQDFARVILHIAKRRGYDDIKNNGDEEKGKILKAIKQNEEKLANYQSVGEYLYKEYFQKFKENSKEFINVRNKKESYERCIAQSFLKDELKLIFKKQREFGFSFSKKFEEEVLSVAFYKRALKDFSHLVGNCSFFTDEKRAPKNSPLAFMFVALTRIINLLNNLKNTLYTKDDLNALLNEVLKNGTLTYKQTKKLLGLSDDYEFKGEKGNYFIEFKKYKEFIKALGEHSLSQDDLNEIAKDITLIKDEIKLKKALAKYDLNENQIDNLSKLEFKDHLNISFKALKLITPLMLEGKKYDEACNELTLKVAINEDKKDFLPAFNETYYKDEVTNPVVLRAIKEYRKVLNALLKKYGKVHKINIELAREVGKNHSQRAKIEKEQNENYKAKKDAELECEKLGLKINSKNILKLRLFKEQKEFCVYSGEKIKLSDLQDEKMLEIDHIYPYSRSFDDSYMNKVLVFTKQNQEKLNQTPFEAFGNDSAKWQKIEVLAKNLPTKKQKRILDKNYKDKEQKDFKDRNLNDTRYIARLVLNYTKDYLDFLPLSDDENTKLNDTQKGSKVHVEAKSGMLTSALRHTWGFSTKDRNNHLHHAIDAVIIAYANNSIVKAFSDFKKEQESNTAELYAKKISELDYKNKRKFFEPFSGFRQKVLDKIDEIFVSKPERKKPSGALHEETFRKEEEFYQSYGGKEGVLKALELGKIRKVNGKIVKNGDMFRVDIFKHKKTNKFYAVPIYTMDFALKVLPNKAVARSKKGEIKDWILMDENYEFCFSLYKDSLILIQTKDMQEPEFVYYNAFTSSTVSLIVSKHDNKFETLSKNQKILFKNANEKEVIAKSIGIQNLKVFEKYIVSALGEVTKAEFRQREEFKNELR

SEQ ID NO: 56 - protein, 1037 aa, Parvibaculum lavamentivorans
MERIFGFDIGTTSIGFSVIDYSSTQSAGNIQRLGVRIFPEARDPDGTPLNQQRRQKRMMRRQLRRRRIRRKALNETLHEAGFLPAYGSADWPVVMADEPYELRRRGLEEGLSAYEFGRAIYHLAQHRHFKGRELEESDTPDPDVDDEKEAANERAATLKALKNEQTTLGAWLARRPPSDRKRGIHAHRNVVAEEFERLWEVQSKFHPALKSEEMRARISDTIFAQRPVFWRKNTLGECRFMPGEPLCPKGSWLSQQRRMLEKLNNLAIAGGNARPLDAEERDAILSKLQQQASMSWPGVRSALKALYKQRGEPGAEKSLKFNLELGGESKLLGNALEAKLADMFGPDWPAHPRKQEIRHAVHERLWAADYGETPDKKRVIILSEKDRKAHREAAANSFVADFGITGEQAAQLQALKLPTGWEPYSIPALNLFLAELEKGERFGALVNGPDWEGWRRTNFPHRNQPTGEILDKLPSPASKEERERISQLRNPTVVRTQNELRKVVNNLIGLYGKPDRIRIEVGRDVGKSKREREEIQSGIRRNEKQRKKATEDLIKNGIANPSRDDVEKWILWKEGQERCPYTGDQIGFNALFREGRYEVEHIWPRSRSFDNSPRNKTLCRKDVNIEKGNRMPFEAFGHDEDRWSAIQIRLQGMVSAKGGTGMSPGKVKRFLAKTMPEDFAARQLNDTRYAAKQILAQLKRLWPDMGPEAPVKVEAVTGQVTAQLRKLWTLNNILADDGEKTRADHRHHAIDALTVACTHPGMTNKLSRYWQLRDDPRAEKPALTPPWDTIRADAEKAVSEIVVSHRVRKKVSGPLHKETTYGDTGTDIKTKSGTYRQFVTRKKIESLSKGELDEIRDPRIKEIVAAHVAGRGGDPKKAFPPYPCVSPGGPEIRKVRLTSKQQLNLMAQTGNGYADLGSNHHIAIYRLPDGKADFEIVSLFDASRRLAQRNPIVQRTRADGASFVMSLAAGEAIMIPEGSKKGIWIVQGVWASGQVVLERDTDADHSTTTRPMPNPILKDDAKKVSIDPIGRVRPSND

SEQ ID NO: 57 - protein, 1107 aa, Eubacterium ventriosum
MGYTVGLDIGVASVGVAVLDENDNIVEAVSNIFDEADTSNNKVRRTLREGRRTKRRQKTRIEDFKQLWETSGYIIPHKLHLNIIELRNKGLTELLSLDELYCVLLSMLKHRGISYLEDADDGEKGNAYKKGLAFNEKQLKEKMPCEIQLERMKKYGKYHGEFIIEINDEKEYQSNVFTTKAYKKELEKIFETQRCNGNKINTKFIKKYMEIYERKREYYIGPGNEKSRTDYGIYTTRTDEEGNFIDEKNIFGKLIGKCSVYPEEYRASSASYTAQEFNLLNDLNNLKINNEKLTEFQKKEIVEIIKDASSVNMRKIIKKVIDEDIEQYSGARIDKKGKEIYHTFEIYRKLKKELKTINVDIDSFTREELDKTMDILTLNTERESIVKAFDEQKFVYEENLIKKLIEFRKNNQRLFSGWHSFSYKAMLQLIPVMYKEPKEQMQLLTEMNVFKSKKEKYVNYKYIPENEVVKEIYNPVVVKSIRTTVKILNALIKKYGYPESVVIEMPRDKNSDDEKEKIDMNQKKNQEEYEKILNKIYDEKGIEITNKDYKKQKKLVLKLKLWNEQEGLCLYSGKKIAIEDLLNHPEFFEIDHIIPKSISLDDSRSNKVLVYKTENSIKENDTPYHYLTRINGKWGFDEYKANVLELRRRGKIDDKKVNNLLCMEDITKIDVVKGFINRNLNDTRYASRVVLNEMQSFFESRKYCNTKVKVIRGSLTYQMRQDLHLKKNREESYSHHAVDAMLIAFSQKGYEAYRKIQKDCYDFETGEILDKEKWNKYIDDDEFDDILYKERMNEIRKKIIEAEEKVKYNYKIDKKCNRGLCNQTIYGTREKDGKIHKISSYNIYDDKECNSLKKMINSGKGSDLLMYNNDPKTYRDMLKILETYSSEKNPFVAYNKETGDYFRKYSKNHNGPKVEKVKYYSGQINSCIDISHKYGHAKNSKKVVLVSLNPYRTDVYYDNDTGKYYLVGVKYNHIKCVGNKYVIDSETYNELLRKEGVLNSDENLEDLNSKNITYKFSLYKNDIIQYEKGGEYYTERFLSRIKEQKNLIETKPINKPNFQRKNKKGEWENTRNQIALAKTKYVGKLVTDVLGNCYIVNMEKFSLVVDK

SEQ ID NO: 58 - protein, 1136 aa, Streptococcus gordonii
MNGLVLGLDIGIASVGVGILEKDTGKIIHASSRLFPAATADNNVERRSNRQGRRLNRRKKHRSVRLQDLFEGYGLLTDFSKVSMNLNPYQLRVQGMENQLTNEELFVALKNIVKRRGISYLDDASEDGGTVSSDYGKAVEENRKLLAEKTPGQIQLERFEKYGQLRGDFTVEENGEKHRLINVFSTSAYRKEAERILRKQQEFNSKITDEFIEDYLIILTGKRKYYHGPGNEKSRTDYGRFRTDGTTLDNIFGILIGKCTFYTEEYRASKASYTAQEFNLLNDLNNLTVPTETKKLSEEQKKLIIEYAKSAKTLGASTLLKYIAKMIDASVDQIRGYRVDVNNKPEMHTFEVYRKMQSLETIKVEELPRKVLDELAHILTLNTEREGIEEAINSKLKDIFNRDQVLELVQFRKNNSSLFSKGWHNFSIKLMMELIPELYETSEEQMTILTRLGKQRSKETSKRTKYIDEKELTEEIYNPVVAKSVRQAIKIINEATKKYGIFDNIVIEMARENNEEDAKKDYIKRQKANQDEKNAAMEKAAFQYNGKKELPDNIFHGHKELTTKIRLWHQQGEKCLYTGKNIPISDLIHNQYKYEIDHILPLSLSFDDSLSNKVLVLATANQEKGQRTPFQALDSMDDAWSYREFKSYVKDSKLLSNKKKDYLLTEEDISKIEVKQKFIERNLVDTRYSSRVVLNALQDFYKSHQLDTTISVVRGQFTSQLRRKWGIEKSRETYHHHAVDALIIAASSQLRLWKKHSNPLIAYKEGQFVDSETGEIVSLSDEEYKELVFKAPYDHFVDTLRSKKFEDSILFSYQVDSKYNRKISDATIYATRKAKLDKEKKEYTYTLGKIKDIYALGTKTPSKTGFYKFLDLYKTDKSQFLMYQKDRKTWDEVIEKIIEQYRPFKEYDKNGKEVDFNPFEKYRIGNGPIRKYSKKGNGPEIKSLKYYDILLGKHKNITPDGSRNTVALLSLNPWRTDVYYNSETKKYEFLGLKYADLCFEEGGAYGISEVKYKKIREKEGIGKNSEFKFTLYKNDLILIKDTETNCQQFFRFWSRTGKDNPKSFEKHKIELKPYEKAKFEKGEELKVLGKVPPSSNQFQKNMQIENLSIYKVKTDILGNKHFIKKEGDEPKLKFKK

SEQ ID NO: 59 - protein, 984 aa, Campylobacter jejuni
MARILAFDIGISSIGWAFSENDELKDCGVRIFTKAENPKTGESLALPRRLARSARKRLARRKARLNHLKHLIANEFKLNYEDYQSFDESLAKAYKGSLISPYELRFRALNELLSKQDFARVILHIAKRRGYDDIKNNGDEEKSEILKAIKQNEEKLVNYQSVGEYLYKEYFQKFKENSKEFINVRNKKESYERCITQSFLKDELKLIFQKQREFGFSFSKKFEEEVLSVAFYKRALKDFSHLVGNCSFFTDEKRAPKNSPLAFMFVALTRIINILNNLKNTEGILYTKDDLNALLNEVLKNGTLTYKQTKKLLGLSDDYEFKGEKGTYFIEFKKYKEFIKALGEHNLSQDDLNEIAKDITLIKDEIKLKKALAKYDLNQNQIDSLSKLEFKDHLNISFKALKLITPLMLEGKKYDEACNELNLKVAINEDKKDFLPAFNETYYKDEVTNPVVLRAIKEYRKILNALLKKYGKVHKINIELAREVGKNHSQRAKIEKEQNENYKAKKDAEIECEKLGLKINSKNILKLRLFKEQKEFCAYSGEKIKLSDLQDEKMLEIDHIYPYSRSFDDSYMNKVLVFTKQNQEKLNKTPFEAFGNDSTKWQKIEVLAKNLPEKKQKRILDKNYKDKEQKDFKDRNLNDTRYIARLVLNYTKDYLDFLPLSDDENTKLNDTQKGSKVHVEAKSGMLTSALRHTWGFSAKDRNNHLHHAIDAAIIAYANNSIVKAFSDFKKEQESNSVELYAKKISELDYKNKRKFFEPFSGFRQKVLDKIDEIFVSKPERKKPSGALHEETFRKEEEFYQSYGGKEGVLKALELGKIRKVNGKIVKNGDMFRVDIFKHKKTNKFYAVPIYTMDFALKVLPNKAVARSKKGEIKDWILMDENYEFCFSLYKDSLILIQTKDMQEPELVYFNAFTSSTVSLIVSKHDNKFETLSKNQKILFKNANEKEVIAKSIGIQNLKVFEKYIVSALGEVTKAEFRQREDFKK

SEQ ID NO: 60 - protein, 1079 aa, Dinoroseobacter shibae
MRLGLDIGTSSIGWWLYETDGAGSDARITGVVDGGVRIFSDGRDPKSGASLAVDRRAARAMRRRRDRYLRRRATLMKVLAETGLMPADPAEAKALEALDPFALRAAGLDEPLPLPHLGRALFHLNQRRGFKSNRKTDRGDNESGKIKDATARLDMEMMANGARTYGEFLHKRRQKATDPRHVPSVRTRLSIANRGGPDGKEEAGYDFYPDRRHLEEEFHKLWAAQGAHHPELTETLRDLLFEKIFFQRPLKEPEVGLCLFSGHHGVPPKDPRLPKAHPLTQRRVLYETVNQLRVTADGREARPLTREERDQVIHALDNKKPTKSLSSMVLKLPALAKVLKLRDGERFTLETGVRDAIACDPLRASPAHPDRFGPRWSILDADAQWEVISRIRRVQSDAEHAALVDWLTEAHGLDRAHAEATAHAPLPDGYGRLGLTATTRILYQLTADVVTYADAVKACGWHHSDGRTGECFDRLPYYGEVLERHVIPGSYHPDDDDITRFGRITNPTVHIGLNQLRRLVNRIIETHGKPHQIVVELARDLKKSEEQKRADIKRIRDTTEAAKKRSEKLEELEIEDNGRNRMLLRLWEDLNPDDAMRRFCPYTGTRISAAMIFDGSCDVDHILPYSRTLDDSFPNRTLCLREANRQKRNQTPWQAWGDTPHWHAIAANLKNLPENKRWRFAPDAMTRFEGENGFLDRALKDTQYLARISRSYLDTLFTKGGHVWVVPGRFTEMLRRHWGLNSLLSDAGRGAVKAKNRTDHRHHAIDAAVIAATDPGLLNRISRAAGQGEAAGQSAELIARDTPPPWEGFRDDLRVRLDRIIVSHRADHGRIDHAARKQGRDSTAGQLHQETAYSIVDDIHVASRTDLLSLKPAQLLDEPGRSGQVRDPQLRKALRVATGGKTGKDFENALRYFASKPGPYQAIRRVRIIKPLQAQARVPVPAQDPIKAYQGGSNHLFEIWRLPDGEIEAQVITSFEAHTLEGEKRPHPAAKRLLRVHKGDMVALERDGRRVVGHVQKMDIANGLFIVPHNEANADTRNNDKSDPFKWIQIGARPAIASGIRRVSVDEIGRLRDGGTRPI

SEQ ID NO: 61 - protein, 1096 aa, Eubacterium dolichum
MMEVFMGRLVLGLDIGITSVGFGIIDLDESEIVDYGVRLFKEGTAAENETRRTKRGGRRLKRRRVTRREDMLHLLKQAGIISTSFHPLNNPYDVRVKGLNERLNGEELATALLHLCKHRGSSVETIEDDEAKAKEAGETKKVLSMNDQLLKSGKYVCEIQKERLRTNGHIRGHENNFKTRAYVDEAFQILSHQDLSNELKSAIITIISRKRMYYDGPGGPLSPTPYGRYTYFGQKEPIDLIEKMRGKCSLFPNEPRAPKLAYSAELFNLLNDLNNLSIEGEKLTSEQKAMILKIVHEKGKITPKQLAKEVGVSLEQIRGFRIDTKGSPLLSELTGYKMIREVLEKSNDEHLEDHVFYDEIAEILTKTKDIEGRKKQISELSSDLNEESVHQLAGLTKFTAYHSLSFKALRLINEEMLKTELNQMQSITLFGLKQNNELSVKGMKNIQADDTAILSPVAKRAQRETFKVVNRLREIYGEFDSIVVEMAREKNSEEQRKAIRERQKFFEMRNKQVADIIGDDRKINAKLREKLVLYQEQDGKTAYSLEPIDLKLLIDDPNAYEVDHIIPISISLDDSITNKVLVTHRENQEKGNLTPISAFVKGRFTKGSLAQYKAYCLKLKEKNIKTNKGYRKKVEQYLLNENDIYKYDIQKEFINRNLVDTSYASRVVLNTLTTYFKQNEIPTKVFTVKGSLTNAFRRKINLKKDRDEDYGHHAIDALIIASMPKMRLLSTIFSRYKIEDIYDESTGEVFSSGDDSMYYDDRYFAFIASLKAIKVRKFSHKIDTKPNRSVADETIYSTRVIDGKEKVVKKYKDIYDPKFTALAEDILNNAYQEKYLMALHDPQTFDQIVKVVNYYFEEMSKSEKYFTKDKKGRIKISGMNPLSLYRDEHGMLKKYSKKGDGPAITQMKYFDGVLGNHIDISAHYQVRDKKVVLQQISPYRTDFYYSKENGYKFVTIRYKDVRWSEKKKKYVIDQQDYAMKKAEKKIDDTYEFQFSMHRDELIGITKAEGEALIYPDETWHNFNFFFHAGETPEILKFTATNNDKSNKIEVKPIHCYCKMRLMPTISKKIVRIDKYATDVVGNLYKVKKNTLKFEFD

SEQ ID NO: 62 - protein, 1082 aa, Neisseria meningitidis
MAAFKPNPINYILGLDIGIASVGWAMVEIDEDENPICLIDLGVRVFERAEVPKTGDSLAMARRLARSVRRLTRRRAHRLLRARRLLKREGVLQAADFDENGLIKSLPNTPWQLRAAALDRKLTPLEWSAVLLHLIKHRGYLSQRKNEGETADKELGALLKGVADNAHALQTGDFRTPAELALNKFEKESGHIRNQRGDYSHTFSRKDLQAELNLLFEKQKEFGNPHISDGLKEGIETLLMTQRPALSGDAVQKMLGHCTFEPAEPKAAKNTYTAERFIWLTKLNNLRILEQGSERPLTDTERTTLIDEPYRKSKLTYAQARKLLELDNTAFFKGLRYGKDNAEASTLMEMKAYHAISRALEKEGLKDKKSPLNLSPELQDEIGTAFSLFKTDEDITGRLKDRVQPEILEALLKHISFDKFVQISLKALRRIVPLMEQGKRYDEACAEIYGDHYGKKNTEEKIDLPPIPADEIRNPVVLRALSQARKVINGVVRRYGSPARIHIETAREVGKSFKDRKEIEKRQEENRKDREKAATKFREYFPNFVGEPKSKDILKLRLYEQQHGKCLYSGKEINLGRLNEKGYVEIDHALPFSRTWDDSFNNKVLVLGSENQNKGNQTPYEYFNGKDNSREWQEFKARVETSRFPRSKKQRILLQKFDEEGFKERNLNDTRYVNRFLCQFVADHMLLTGKGKRRVFASNGQITNLLRGFWGLRKVRAENDRHHALDAVVVACSTVAMQQKITRFVRYKEMNAFDGKTIDKETGEVLHQKTHFPQPWEFFAQEVMIRVFGKPDGKPEFEEADTPEKLRTLLAEKLSSRPEAVHEYVTPLFVSRAPNRKMSGQGHMETVKSAKRLDEGVSVLRVPLTQLKLKDLEKMVNREREPKLYEALKARLEAHKDDPAKAFAEPFYKYDKAGNRTQQVKAVRVEQVQKTGVWVRNHNGIADNATMVRVDVFEKGDKYYLVPIYSWQVAKGILPDRAVVQGKDEEDWQLIDDSFNFKFSLHPNDLVEVITKKARMFGYFASCHRGTGNINIRIHDLDHKIGKNGILEGIGVKTALSFQKYQIDELGKEIRPCRLKKRPPVR

SEQ ID NO: 63 - protein, 1050 aa, Gluconacetobacter diazotrophicus
MGENMIDESLTFGIDLGIGSCGWAVLRRPSAFGRKGVIEGMGSWCFDVPETSKERTPTNQIRRSNRLLRRVIRRRRNRMAAIRRLLHAAGLLPSTDSDALKRPGHDPWELRARGLDKPLKPVEFAVVLGHIAKRRGFKSAAKRKATNISSDDKKMLTALEATRERLGRYRTVGEMFARDPDFASRRRNREGKYDRTTARDDLEHEVHALFAAQRRLGQGFASPELEEAFTASAFHQRPMQDSERLVGFCPFERTEKRAAKLTPSFERFRLLARLLNLRITTPDGERPLTVDEIALVTRDLGKTAKLSIKRVRTLIGLEDNQRFTTIRPEDEDRDIVARTGGAMTGTATLRKALGEALWTDMQERPEQLDAIVQVLSFFEANETITEKLREIGLTLAVLDVLLTALDAGVFAKFKGAAHISTKAARNLLPHLEQGRRYDEACTMAGYDHAASRLSHHGQIVAKTQFNALVTEIGESIANPIARKALIEGLKQIWAMRNHWGLPGSIHVELARDVGNSIEKRREIEKHIEKNTALRARERREVHDLLDLEDVNGDTLLRYRLWKEQGGKCLYTGKAIHIRQIAATDNSVQVDHILPWSRFGDDSFNNKTLCLASANQQKKRSTPYEWLSGQTGDAWNAFVQRIETNKELRGFKKRNYLLKNAKEAEEKFRSRNLNDTRYAARLFAEAVKLLYAFGERQEKGGNRRVFTRPGALTAALRQAWGVESLKKQDGKRINDDRHHALDALTVAAVDEAEIQRLTKSFHEWEQQGLGRPLRRVEPPWESFRADVEATYPEVFVARPERRRARGEGHAATIRQVKERECTPIVFERKAVSSLKEADLERIKDGERNEAIVEAIRSWIATGRPADAPPRSPRGDIITKIRLATTIKAAVPVRGGTAGRGEMVRADVFSKPNRRGKDEWYLVPVYPHQIMNRKAWPKPPMRSIVANKDEDEWTEVGPEHQFRFSLYPRSNIEIIRPSGEVIEGYFVGLHRNTGALTISAHNDPKSIHSGIGTKTLLAISKYQVDRFGRKSPVRKEVRTWHGEACISPTPPG

SEQ ID NO: 64 - protein, 1391 aa, Kordia algicida
MKKILGLDLGTNSIGWALVNEAEHEHEQSSIVKLGVRVNPLSVDEKTNFEKGRPLSINADRTSKRSARRNLQRFKLRRKNLINLLLKHHIISNETILTEVGKNTTHQTLKLRSKATQEKISLEEFARILLSINKKRGYKSSRKEKNEDEGFTIDGMAIAKELYDNQLTPGQYVYNILQDGKNYIPDFYRSDLQAEFDDVWQFQKKFYSSILTDEFYLKLKGQGKENTRKLFLAIHQVYTAENKGKRDAVKLQYYKWRSEAVKKQLSIEEVAYVLVEINNNINKSSGYLGAISDRSKALYFNNETVGEYLYGQLVKNRHNSLRNQVFYRQDYLDEFEKIWETQAKFYDELTNELKQEIRDVVIFYQRKLKSQKHLISDCLFEKHHKAIPKSSPLFQEFKIWQNLNYLEFVHTQSKEKIFFSELDDETRQFVFAELNIRGTLKIKEIKKLIGLETPVYWKSNFDEIEGNRTNQVLYNVYQNIADDLGYGFDWSKKHAFEINAELQAIFKDVGIDTAILNFDASIEENDFDKQKSYQLWHLLYSAEDTDKATEEDKLIYGNINTKLKKQLHQKYGFEAKYGNLLANISLQQDYGNLSAKAIKKILPYLESGNSFYEACTIVGYNPSNSLTKEQQQNRKLKDKLELLPKNSLRNPVVEKILNQKVNLINQLIDEYGKPDEVRIELARELKKSAKQRADLSKHINDATLKNQNIRKTLQKDFGIQNPSKNDVIRYKLYDELKDNGYKTLFTNKYIPKEQLFSKDVDIEHIIPKAILFDDSFSNKTLAYRNVNLAKADATAFDFISSKHLDDLDNYKARVETLFQSKRISKGKYKKLLMTRQNLPEDFIERDLRNSQYIAKKATAMLKEVFRSVVPTSGRITDKLREDWDLVNVMKELNLPKYRTLGLTEFIERKNGNKIEQIIDWTKRNDHRHHAMDALTVAFTTHNHIQYLNNLNVTHGLNGVDTDHEKSRLYAIKQAITKVYIVGKTKKRKFIPPMENFRSHAKNHLEGILISFKNKNKVVTKNKNRTKTKTKGVFNEKIQLTPRGQLHKETIYGHAKKVIVTKEKVSSKFTHEKILQVTKPAYREALLKRLASFKNDPKKAFSGKNALSKNPLYFDITSGKKVPDTVKLSYFENSYVIRKEVNSDNFKNEKSLQKVLDVGIRRILEKRLADYNGNAKEAFSNLEKNPIWKDKEKGVCIKKVRIEALKNAEPLHVKKDHLGKIILDDENKSTPVDFISTGNNHHVAIYEDKDGKLHDKVVSFYEVVSRVNLGLPIIDKSFNSHLDWKFLFSMKQNEMFVFPSEDFNPKEIDIGNPKNNELISKYLFRVQKFSKVTYGNSAVRDYVFRHHLETELIDKKELKGITYYQLKSIGMLEKLVKVRINHIGKIVHIGEY

SEQ ID NO: 65 - protein, 1116 aa, Clostridium spiroforme
MVEFLLKEMKIMGRLVLGLDIGITSVGYGVIDIDKNEFVDYGVRLFKEGTAINNEERRSKRGARRLKRRKTNRIADMKKLLERNGLIDEQYTALNNPYEIRKKGLKNKLSNYELATAILHITKNRGTCLESNADETQDEESTKNILSKNALELKDKYICEIQLARLEESGKIRGINNNFKTEDYLKELSKILENQDLEKETIDKIKEIVARRRRYDQGPGSEKSPTPYGSYRMENGELVHVNLIDMMRGKCSVFPDQLRAPQQSYSAELFNLLNDLNNLKINGEKLSSTEKQKIIDFVNEKGGITVKQLLKLIDVGITEISGFRIDKNEKPLITEFKGYKKVLKVFKNYNQESLLNDKSIVDTIMDINTKIKSIDERSDQLKQVLPSLDTSIINDLASIKGVSGYHSLSLKALNLINNEMLKTEMNQMQVLHQLDIFDKNRVSLKGQRQIYADDNAILSPVAKRAHRETFKVINKLRSIYGEFDSIVIETTRDKNTQDQKKRIKNNQKNYEERNTEVNNFLKEAGYNPENINAKTKMKIRLYIEQDAKSAYTLQDINLKELIEDEKAYEIDHIIPISISLDDSFNNKVLTTHDENQEKGNLTPISAFLKGKFHNGNLNTYKVFIQNNKNLNRKKKEYLLCEDDITRYEVVQNFINRNLVDTSYACRTVMNTLVHYFKDNEINTKVHTIKGQATSTFRKRIGLIKDREEDYFHHAIDALIVASLKKMNLINSYLMKVDFNEMYDEETGEIFNVLPDNSYLDEKYISFVSNLKNIYEESNKYIRGVMIKEKMTYPLIKVSHKIDTKPNRKISDDTIYSTRNVDNQDMLVERIKNIYDPKENAANTLINDIINDNTDKYIMYHKDPQTFDKIKAIVLNHFNEFKTDKNCYIVTKEGLYKLKGTSPLALYYEEFGPITKYAKKNNGPTIHSMKFYSEKLGNHLSITHKYSTVNKKVITKQISPYRTDFYQSPEGKYKFVTVRYKDVAYNAKKDKYIIDHSWYREQKKLKKIADEWIFVCSVHRDELIGIMKADGQKRIFDSSTESDGETLYHDAKTYEILKFTATNNDITGRFEVKPIYCYCKKQLMVSIGTCRKIQKFATDVLGNLYIVKDNVLKLEFK

SEQ ID NO: 66 - protein, 1348 aa, Finegoldia magna
MKSEKKYYIGLDVGTNSVGWAVTDEFYNILRAKGKDLWGVRLFEKADTAANTRIFRSGRRRNDRKGMRLQILREIFEDEIKKVDKDFYDRLDESKFWAEDKKVSGKYSLFNDKNFSDKQYFEKFPTIFHLRKYLMEEHGKVDIRYYFLAINQMMKRRGHFLIDGQISHVTDDKPLKEQLILLINDLLKIELEEELMDSIFEILADVNEKRTDKKNNLKELIKGQDFNKQEGNILNSIFESIVTGKAKIKNIISDEDILEKIKEDNKEDFVLTGDSYEENLQYFEEVLQENITLFNTLKSTYDFLILQSILKGKSTLSDAQVERYDEHKKDLEILKKVIKKYDEDGKLFKQVFKEDNGNGYVSYIGYYLNKNKKITAKKKISNIEFTKYVKGILEKQCDCEDEDVKYLLGKIEQENFLLKQISSINSVIPHQIHLFELDKILENLAKNYPSFNNKKEEFTKIEKIRKTFTFRIPYYVGPLNDYHKNNGGNAWIFRNKGEKIRPWNFEKIVDLHKSEEEFIKRMLNQCTYLPEETVLPKSSILYSEYMVLNELNNLRINGKPLDTDVKLKLIEELFKKKTKVTLKSIRDYMVRNNFADKEDFDNSEKNLEIASNMKSYIDFNNILEDKFDVEMVEDLIEKITIHTGNKKLLKKYIEETYPDLSSSQIQKIINLKYKDWGRLSRKLLDGIKGTKKETEKTDTVINFLRNSSDNLMQIIGSQNYSFNEYIDKLRKKYIPQEISYEVVENLYVSPSVKKMIWQVIRVTEEITKVMGYDPDKIFIEMAKSEEEKKTTISRKNKLLDLYKAIKKDERDSQYEKLLTGLNKLDDSDLRSRKLYLYYTQMGRDMYTGEKIDLDKLFDSTHYDKDHIIPQSMKKDDSIINNLVLVNKNANQTTKGNIYPVPSSIRNNPKIYNYWKYLMEKEFISKEKYNRLIRNTPLTNEELGGFINRQLVETRQSTKAIKELFEKFYQKSKIIPVKASLASDLRKDMNTLKSREVNDLHHAHDAFLNIVAGDVWNREFTSNPINYVKENREGDKVKYSLSKDFTRPRKSKGKVIWTPEKGRKLIVDTLNKPSVLISNESHVKKGELFNATIAGKKDYKKGKIYLPLKKDDRLQDVSKYGGYKAINGAFFFLVEHTKSKKRIRSIELFPLHLLSKFYEDKNTVLDYAINVLQLQDPKIIIDKINYRTEIIIDNFSYLISTKSNDGSITVKPNEQMYWRVDEISNLKKIENKYKKDAILTEEDRKIMESYIDKIYQQFKAGKYKNRRTTDTIIEKYEIIDLDTLDNKQLYQLLVAFISLSYKTSNNAVDFTVIGLGTECGKPRITNLPDNTYLVYKSITGIYEKRIRIK

SEQ ID NO: 67 - protein, 1129 aa, Streptococcus infantarius
MSNGKILGLDIGVASVGVGIIDSKTGNVIHANSRLFSAANAENNAERRGFRGARRLTRRKKHRVKRVRDLFEKYDISTDFRNLNLNPYELRVKGLTEQLTNEELFAALRTIAKRRGISYLDDAEDDSTGSSDYAKSIDENRRLLKTKTPGQIQLERLEKYGQLRGNFTVYDENGEAHRLINVFSTSDYKNEARKILETQSNYNKQITDEFIEDYIEILTQKRKYYHGPGNEKSRTDYGRFRTDGTTLENIFGILIGKCSFYPEEYRASKASYTAQEFNFLNDLNNLKVPTETGKLSTEQKEYLVDFAKKSKALGASKLLKEIAKIVDCSVDDIKGYRVDNKDKPDLHTFEPYRKLKFNLSSIDIDELSRETLDKLADILTLNTEREGIEDAIKRNLPSQFTEEQISEIVQIRKNQSSAFNKGWHSFSAKLMNELIPELYVTSEEQMTILTRLEKFKVNKKSSKNTKTIDEKEITDEIYNPVVAKSVRQTIKIINAAVKKYGDFDKIVIEMPRDKNAEDEKKFIDKKQKENKKEKDDSLKRAAFLYNGTDNLPDGVFHGNKELKTKIRLWYQQGERCLYSGKLISIHDLVHNSNKFEIDHILPLSLSFDDSLANKVLVYAWTNQEKGQKTPYQVIDSMDTAWSFREMKDYVLKQKGLGKKKCEYLLTTENIDKIEVKKKFIERNLVDTRYASRVVLNSLQTALKELGKDTKVSVVRGQFTSQLRRKWNIDKSRETYHHHAVDALIIAASSQLKLWQKQENPMFESYGENQVVNKETGEILSISDDKYKELVFQPPYQGFVNTISSKGFEDEILFSYQVDSKFNRKVSDATIYSTRKAKLGKDKKDETYVLGKIKDIYSQDGFDTFIKRYKKDKTQFLMYQKDPLTWENVIEVILRDYPSEKLSEDGKKTVKCNPFEEYRRENGLICKYSKKGNGTPIKSLKYYDKKLGNCIDITPEKSKNRVVLRQISPWRADIYFNLETLKYELMGLKYSDLSFEKGTGKYHISQEKYDAIREKEGIGKKSEFKFTLYRNDLILIKDTLNNCERMLRFGSKNDTSKHYVELKPLEKGTFDSEEEILPVLGKVAKSGQFIKGLNKPNISIYKVRTDVLGNKFFIKKEGDKPKLDFKNNNK

SEQ ID NO: 68 - protein, 1065 aa, Clostridium perfringens
MNKDINYALGLDIGITSVGWAVINLDLNRIEDLGVRIFNAAENLKDGSSLALPRRLARGRRRLLRRKAYRVERVRKLILKNNILTKEELEGLFKNKEVIDVWEARVKGLDYKLSREEWAKILINFCKRRGFKSNRKNEAKDKEAGQILSSISYNIEKMKETNSRTIGEYIYNEVKNSEDSYAPLRNKFGEYKMCVSRDVIREEIHTLFEKQRELGNNFASDEIEDKYFEIFNSQRPFSNFEDLEKLVGFCTFERKKHKRAPKHCISSEEFTLYEGINKLSIIKDGEKRKLSEEERTLVVNEAFNKKEIKYTTLRKLLGLSEEELFSTLTYSIDKDISKTENTKFVSLKGYHEIKRAIEKGVSKKAWQDIENNRNLLNDIAYVLTLGKTDDEIEKQLRLRNVPEELFESLLDMSFNKFNNLSIYALEKILPFMKEGYQYNEACEKAGYNFKAIYEGVRTKKLPVIEIDEIVNPVVNRALAQTRKVINSVIDKYGSPVRINIELARDLAKNFKDRKLIEKEQKENRANLDKIRENLRELMDKEPTVVEVLKYRLWEQQRGECAYTQSQIPLERLFSPGYCEIDHIIPFSRSFDDSLSNKILVLGSENQRKGNRTPYEYFGEDSERWNSFEIWVKGSYLNYKKKANLLKKKFSEEEQRDWKARNLQDTKYICRYISNFVNNRLEFKESENKQKVITVNGRATAYLRSRWGLNKVREDGDKHHALDAAVVGVTTQGMVQKISKYSKAHELYTVRKNDEFVDVETGECVDVDEYKEIRKDILPRPWRGFSEELKLRLSDNPLEELKKSPIETYNEEFIKENVKPIFVSRVPFRKISGKLFKETIYSERAFKDGYFVSKKSLVDLKRGDLDNFYNYECDKKLYDAISERMKEFNYNGKKAFESPFRKPTKSGKEGPVVRSVKIKSAVPFKDGIPMNEGLVAKEGMVRIDIYEKEGKYFVVPVYRYQLAKGIVPKRAAIAKKDELKWPIMDQTYNFKFSIYKNDLIEVKYDKKGVYFGYYDGFDRNSASLTIEKHDNSERYRSIGLKVGVLEINKYEVDVLGNYHKVKLGGN

SEQ ID NO: 69 - protein, 1195 aa, Elusimicrobium minutum
MQKNINTKQNHIYIKQAQKIKEKLGDKPYRIGLDLGVGSIGFAIVSMEENDGNVLLPKEIIMVGSRIFKASAGAADRKLSRGQRNNHRHTRERMRYLWKVLAEQKLALPVPADLDRKENSSEGETSAKRFLGDVLQKDIYELRVKSLDERLSLQELGYVLYHIAGHRGSSAIRTFENDSEEAQKENTENKKIAGNIKRLMAKKNYRTYGEYLYKEFFENKEKHKREKISNAANNHKFSPTRDLVIKEAEAILKKQAGKDGFHKELTEEYIEKLTKAIGYESEKLIPESGFCPYLKDEKRLPASHKLNEERRLWETLNNARYSDPIVDIVTGEITGYYEKQFTKEQKQKLFDYLLTGSELTPAQTKKLLGLKNTNFEDIILQGRDKKAQKIKGYKLIKLESMPFWARLSEAQQDSFLYDWNSCPDEKLLTEKLSNEYHLTEEEIDNAFNEIVLSSSYAPLGKSAMLIILEKIKNDLSYTEAVEEALKEGKLTKEKQAIKDRLPYYGAVLQESTQKIIAKGFSPQFKDKGYKTPHTNKYELEYGRIANPVVHQTLNELRKLVNEIIDILGKKPCEIGLETARELKKSAEDRSKLSREQNDNESNRNRIYEIYIRPQQQVIITRRENPRNYILKFELLEEQKSQCPFCGGQISPNDIINNQADIEHLFPIAESEDNGRNNLVISHSACNADKAKRSPWAAFASAAKDSKYDYNRILSNVKENIPHKAWRFNQGAFEKFIENKPMAARFKTDNSYISKVAHKYLACLFEKPNIICVKGSLTAQLRMAWGLQGLMIPFAKQLITEKESESFNKDVNSNKKIRLDNRHHALDAIVIAYASRGYGNLLNKMAGKDYKINYSERNWLSKILLPPNNIVWENIDADLESFESSVKTALKNAFISVKHDHSDNGELVKGTMYKIFYSERGYTLTTYKKLSALKLTDPQKKKTPKDFLETALLKFKGRESEMKNEKIKSAIENNKRLFDVIQDNLEKAKKLLEEENEKSKAEGKKEKNINDASIYQKAISLSGDKYVQLSKKEPGKFFAISKPTPTTTGYGYDTGDSLCVDLYYDNKGKLCGEIIRKIDAQQKNPLKYKEQGFTLFERIYGGDILEVDFDIHSDKNSFRNNTGSAPENRVFIKVGTFTEITNNNIQIWFGNIIKSTGGQDDSFTINSMQQYNPRKLILSSCGFIKYRSPILKNKEG

SEQ ID NO: 70 - protein, 1101 aa, Akkermansia muciniphila
MSRSLTFSFDIGYASIGWAVIASASHDDADPSVCGCGTVLFPKDDCQAFKRREYRRLRRNIRSRRVRIERIGRLLVQAQIITPEMKETSGHPAPFYLASEALKGHRTLAPIELWHVLRWYAHNRGYDNNASWSNSLSEDGGNGEDTERVKHAQDLMDKHGTATMAETICRELKLEEGKADAPMEVSTPAYKNLNTAFPRLIVEKEVRRILELSAPLIPGLTAEIIELIAQHHPLTTEQRGVLLQHGIKLARRYRGSLLFGQLIPRFDNRIISRCPVTWAQVYEAELKKGNSEQSARERAEKLSKVPTANCPEFYEYRMARILCNIRADGEPLSAEIRRELMNQARQEGKLTKASLEKAISSRLGKETETNVSNYFTLHPDSEEALYLNPAVEVLQRSGIGQILSPSVYRIAANRLRRGKSVTPNYLLNLLKSRGESGEALEKKIEKESKKKEADYADTPLKPKYATGRAPYARTVLKKVVEEILDGEDPTRPARGEAHPDGELKAHDGCLYCLLDTDSSVNQHQKERRLDTMTNNHLVRHRMLILDRLLKDLIQDFADGQKDRISRVCVEVGKELTTFSAMDSKKIQRELTLRQKSHTDAVNRLKRKLPGKALSANLIRKCRIAMDMNWTCPFTGATYGDHELENLELEHIVPHSFRQSNALSSLVLTWPGVNRMKGQRTGYDFVEQEQENPVPDKPNLHICSLNNYRELVEKLDDKKGHEDDRRRKKKRKALLMVRGLSHKHQSQNHEAMKEIGMTEGMMTQSSHLMKLACKSIKTSLPDAHIDMIPGAVTAEVRKAWDVFGVFKELCPEAADPDSGKILKENLRSLTHLHHALDACVLGLIPYIIPAHHNGLLRRVLAMRRIPEKLIPQVRPVANQRHYVLNDDGRMMLRDLSASLKENIREQLMEQRVIQHVPADMGGALLKETMQRVLSVDGSGEDAMVSLSKKKDGKKEKNQVKASKLVGVFPEGPSKLKALKAAIEIDGNYGVALDPKPVVIRHIKVFKRIMALKEQNGGKPVRILKKGMLIHLTSSKDPKHAGVWRIESIQDSKGGVKLDLQRAHCAVPKNKTHECNWREVDLISLLKKYQMKRYPTSYTGTPR

SEQ ID NO: 71 - protein, 1187 aa, Bifidobacterium longum
MLSRQLLGASHLARPVSYSYNVQDNDVHCSYGERCFMRGKRYRIGIDVGLNSVGLAAVEVSDENSPVRLLNAQSVIHDGGVDPQKNKEAITRKNMSGVARRTRRMRRRKRERLHKLDMLLGKFGYPVIEPESLDKPFEEWHVRAELATRYIEDDELRRESISIALRHMARHRGWRNPYRQVDSLISDNPYSKQYGELKEKAKAYNDDATAAEEESTPAQLVVAMLDAGYAEAPRLRWRTGSKKPDAEGYLPVRLMQEDNANELKQIFRVQRVPADEWKPLFRSVFYAVSPKGSAEQRVGQDPLAPEQARALKASLAFQEYRIANVITNLRIKDASAELRKLTVDEKQSIYDQLVSPSSEDITWSDLCDFLGFKRSQLKGVGSLTEDGEERISSRPPRLTSVQRIYESDNKIRKPLVAWWKSASDNEHEAMIRLLSNTVDIDKVREDVAYASAIEFIDGLDDDALTKLDSVDLPSGRAAYSVETLQKLTRQMLTTDDDLHEARKTLFNVTDSWRPPADPIGEPLGNPSVDRVLKNVNRYLMNCQQRWGNPVSVNIEHVRSSFSSVAFARKDKREYEKNNEKRSIFRSSLSEQLRADEQMEKVRESDLRRLEAIQRQNGQCLYCGRTITFRTCEMDHIVPRKGVGSTNTRTNFAAVCAECNRMKSNTPFAIWARSEDAQTRGVSLAEAKKRVTMFTFNPKSYAPREVKAFKQAVIARLQQTEDDAAIDNRSIESVAWMADELHRRIDWYFNAKQYVNSASIDDAEAETMKTTVSVFQGRVTASARRAAGIEGKIHFIGQQSKTRLDRRHHAVDASVIAMMNTAAAQTLMERESLRESQRLIGLMPGERSWKEYPYEGTSRYESFHLWLDNMDVLLELLNDALDNDRIAVMQSQRYVLGNSIAHDATIHPLEKVPLGSAMSADLIRRASTPALWCALTRLPDYDEKEGLPEDSHREIRVHDTRYSADDEMGFFASQAAQIAVQEGSADIGSAIHHARVYRCWKTNAKGVRKYFYGMIRVFQTDLLRACHDDLFTVPLPPQSISMRYGEPRVVQALQSGNAQYLGSLVVGDEIEMDFSSLDVDGQIGEYLQFFSQFSGGNLAWKHWVVDGFFNQTQLRIRPRYLAAEGLAKAFSDDVVPDGVQKIVTKQGWLPPVNTASKTAVRIVRRNAFGEPRLSSAHHMPCSWQWRHE

SEQ ID NO: 72 - protein, 166 aa, Candidatus Endomicrobiellum trichonymphae
MNKVQEIEYKKIREKLADREYRIGLDLGVGSIGYVVVSLKECNDLSYLPEDIILSGSRIFKSSIGAVERREFRLQRNSHRHHRERMRFLWQLLAEKQLALQSSKDLEKKENSADCETSQKRFPINILKEDPYILRYKALEEKLSLFQLGYVLYHIANHSNTAYENT

SEQ ID NO: 73 - protein, 1032 aa, Candidatus Endomicrobiellum trichonymphae
MLYHIANHRGTDSVRSFLEYDDDKIKENTLTAKIAKETKKVIDAKKYRTFGEYLYKGKIEKFQQNIRKKVSNRKTPANKNKEFAVTRDVIIKETEKILASQKQYYTYILTDEYIKKIKDAISYQTEKLIPESGYCPYFKDEKRLPRSHKLNEYRRMYEALNNAKYFDPVLDENTGEILSYQEKEFSREEKKILFDEVLLKGMELTESGAKKLLYHLPDGCEVQLQGRDKTTQKIKGYALVDLEASPFWLRLSQQQQDEFLYDWNSLPLEKLKPKLTNYYSLTESEVDETFQEIKLPSNYASVGKKAMEILLTYIKDGCSYTEALEKAVSEGKLKVDKQTMIYDSLPYYGKILKESTQKLIGKAFSKQFADRNYKEPDTNKNEREFGKIANPVVHQTLNELRKLINEIITVFGKKPLEIGLETTRELKKSKKNREYLSKQQNKNEYARNRIYKEYIEPHLSQIKSRQENPSKYISKFELLEEQNFICPFCSEKITPDDIINSKVDVEHIFPIEESEDITKNNLVIAHNECNADKGKKSPFDAFGDKTSGKYRWNCILHNAQKNLPHKVWRFYQGSLEKFLENKPMSRRFGTDNSYISKIAARYLACLFNDPYHSEIFCIKSSLIAQLRIAWDLNSIMVPLVKNILSEKELEEFKISKNKKIRIDNRHHALDAIVIAYANRGYHNFLNRIHAKEYKINYREKSWLSKILLPPLNRDLEDFKISVKDSIEKANVSIKHDHNTNGSLVKATAYKVYYSGAGEYIITTSKNVEEISFKEKEDPKDTLYRALCKFECRDIDIKDEKLIKKLKYNSTLYKKVQNNLSKAKQELEQDNKKTEEEGKKSQKITEVRIYKKACSLVKGQYIQCGSRLKDKFFAVKEPTEIKTGLGYDTGDNLFLDLYYDKTGKLCGEIIRKVNFNRNKPNYQKEGYTLFERIYQSDILEVDTSEDRISLKNKTGSAPSDRTFIKVNTFTEVNAYFDGKRDKIQIFFGNLLKSSFKNDSFFISSMQKYNVRKVILTSLGIIKYRSQILKNKEV

SEQ ID NO: 74 - protein, 1032 aa, Candidatus Endomicrobiellum trichonymphae
MKKRILGLDIGIASVGWALVEFDDEFQDNKKKGTIIKSGVRIFTRAETPKERESLAKPRREARSQRRRIRRRVERLNSIRELFVKNGVVEEWSVSKKNPNNIYITLNQIKTPWQLRMESLDRKLTNEQFAVVLTHLAKHRGYKSLRKDDKAGKVLEAISQNKKRLNDSDYRTLGEMFCKNESYKEHKRNKGGEYINSVARELIEEEVEKIFVKQREKGNNFADVNTEREYLKIAFSQKPAGSISKMVGFCTFENGEKRAPRDSYSAELFKVLCTINNTTFTDMKTGEIRSFSKEEIGKTLETVKNVKDVKYAKIRKDLGLEDSVKFSGVDYRENAKSKGEGEIFVSMKTYHEIKSKIEKLSKEKWDNLKGNTELLDSIVNIIANLKDDESIKKEFQKLKIDEDIIDVLLNFEFKKFINLSFKALRKIIPFQFQGQKYITASTSAGYSLKQEGIKNKLVPPAKENINVAVVARAFAQTRKVINAVIRKYGQFDQINIELATELKNSKFDRSKIEEGQKKFQSQKDKIFKEVQELRGGMTPSSSLLLKYRLWREQDERCVYSGRKISFEDLLDTGFLDIDHIIPYSKSMDDSFNNKVLCLAEENRNKKNDIPFNYYQRIDRDWNLLISIITSMKNMKIAKKSRLLKQELSDIEGFIERNINDTRYATRYIKDFLENNLEFKENEFIKVKVQARSGGLTSVLSYNWGMSKDREESYFHHAKDAIIVACSTQGMVQYISKISQQYENDKDKMKKIKDKTENCIPKPWDSFRADVEESIEGIFVSFAPRHKVTGSAHKETIYSKKHLEKERYVTVKKSLDKIKLSDLENIPCNENCGIIRVLKERLEKFKNDSLKAFADPVHMPTKCPNKKGPVIRSVKIKESNKTGIEVRKGLAERGEMVRVDVFIKDKKYYLVPIYVSDFKNKDLPNKAIAALKLENEWIMIDKTYSFKFSLFKDDLIKIKKKKEEIFGYFGGVHRSTGTIKIKSRHKPKEIDEGIGSRCLLDFRKFQVDVLGNYTEVKHEKRMPAYITRKDKKH

SEQ ID NO: 75 - protein, 1361 aa, Lactobacillus casei
MTKLGKPYGIGVDIGSNSIGFAAVDENSHLIRLKGKTVIGARLFEEGKAAADRRASRTTRRRLSRNRWRLSFLRDFFESHITPTGPNFFMRQKYSEISPKDKARYKYEKRLFNDRTDAEFYQQYPTMYHLRNRLLTDPSKADVREIYFAIHHILKSRGHFLTSGYAKDFNTNKVALNEIFPALQDAYAQVYPDLDITFDENKVNEFKTVLLNEKATPSDTQRALVNLLLAEDGDKDILKQQKQVLTEFAKAVVGLKTKLNVALGTEVDSSEATVWNFSLGQLDDKWAGIESAMTDEGTEILDQIRDLYRARLLNGIVPAGKTLSQAKVDDYAQHHEDLELFKDYLKQLEDDGTAKAIRQLYDRYIDGDDAKPFVREDFVKALTKEVTAHPNAKSPELLERLAQPDFMLKQRNKANGAIPVQMQQRELDQIIKNQSVYYDWLAAPNPVEKHRKSMPYQLDELLNFRIPYYVGPLVTAKEQKAAQGGVFAWMVRKDPDGNITPYNFDEKVDREASANTFIQRMKTTDTYLIGEDVLPKQSLLYQRYEVLNELNNVRVNNEKLSIEQKQQVIRELFERHNSVTIKQFAENLRAHGDYAHIPEIRGLADEKRFLSSLSTYRQLKSLLPDAIDDPAKQADIENIIAWSTVFEDAAIFKTKLKEINWLDSQTITKLSNIRYRGWGQFSHKFLNGLTLGNGHTIIQELFLSNNNLMQILTDETLQKKMTELNADKLKAANINDAIDDAYTSPSNKKALRQVLRVIEDIKRAADGQDPSWLYVETADGGGTPGKRTRARQHQLQEIYANAAHELIDSAVRGELEDKIADKADFNDRLVLYFMQGGRDIYTGTPLNIDQLSSYDIDHILPQSLIKDNSLDNRVLVHAIINREKNATFASTIYAQKMNATWRQWHEAGLISGRKLRNLQMRPDQIDKYASGFVARQLVETRQIIKLTEQIVAAQYPETKIIAVKAGLSHQLREELEFPKNRDVNHYHHAFDAFLAARIGTYLLKRFPNLQAFFTYGKFKKADVKKLRGFNFIRDITHAEDKIVVKDTGEVIWDKKRDVDELDRIYNFKRMLITHEVHFEKADLFKQTVYGAKDSKEAGGKKQLISKKKGYPVDIYGGYTQETGSYLSVVRLTKKAMYAVVKVSTRDAAKLAVAKSISEQKENETLNDIIDEKLSKISKNGKITHELFEVVLPRVGQKTLFKNSKYNLFLVNSDTYMHNYQELWMPREYQKMWKDISLSKYGDAQTEDQLDQIFGFIVSQVNSYFNLYDINQFRKKLNDAADKFATLPMRDTDDMQGKIATIGQLLIGLQANAARSDLRNLDIKTPLGLLQIPNGISLDSDTSVVYQSPTGLLEREVHLSDL

SEQ ID NO: 76 - protein, 1348 aa, Streptococcus equi
MKKPYTIALDIGTNSVGWVVVTDDYRVPTKKMKVLGNTERKTIKKNLIGALLFDSGDTAEGTRLKRTARRRYTRRKNRLRYLKEIFTEEMAKVDDGFFQRLEDSFYVLEDKEGNKHPIFANLADEVAYHKKYPTIYHLRKELVDNPQKADLRLIYLAVAHIIKFRGHFLIEGTLSSKNNNLQKSFDHLVDTYNLLFEEQRLLTEGINAKELLSAALSKSKRLENLISLIPGQKKTGIFGNIIALSLGLTPNFKANFGLSKDVKLQLAKDTYADDLDSLLAQIGDQYADLFLAAKNLSDAILLSDILTESDEITRAPLSASMVKRYREHHKDLVTLKTLIKDQLPEKYQEIFLDKTKNGYAGYIEGQVSQEEFYKYLKPILARLDGSEPLLLKIDREDFLRKQRTFDNGSIPHQIHLEELHAILRRQEVFYPFLKDNRKKIESLLTFRIPYYVGPLARGHSRFAWVKRKFDGAIRPWNFEEIVDEEASAQIFIEKMTKNDLYLPNEKVLPKHSLLYETFTVYNELTKVKYATEGMTRPQFLSADQKQAIVDLLFKTNRKVTVKQLKENYFKKIECWDSVEITGVEDSFNASLGTYHDLLKIIQDKDFLDNPDNQKIIEDIILTLTLFEDKKMISKRLDQYAHLFDKVVLNKLERHHYTGWGRLSGKLINGIRDKQSGKTILDFLKADGFANRNFMQLIHDSELSFIDEIAKAQVIGKTEYSKDLVGNLAGSPAIKKGISQTIKIVDELVKIMGYLPQQIVIEMARENQTTAQGIKNARQRMRKLEETAKKLGSNILKEHPVDNSQLQNDKRYLYYLQNGKDMYTGDDLDIDYLSSYDIDHIIPQSFIKNNSIDNKVLTSQGANRGKLDNVPSEAIVRKMKGYWQSLLRAGAISKQKFDNLTKAERGGLTQVDKAGFIQRQLVETRQITKHVAQILDSRFNTEFDDHNKRIRKVHIITLKSKLVSDFRKEFGLYKIRDINHYHHAHDAYLNAVVAKAILGKYPQLAPEFVYGDYPKYNSFKERQKATQKMLFYSNILKFFKDQESLHVNSDGEEIWNANKHLPIIKNVLSIPQVNIVKKTEVQTGGFYKESILSKGNSDKLIPRKNNWDTRKYGGFDSPTVAYSVLVIAKMEKGKAKVLKPVKEMVGITIMERTAFEENPVVFLEARGYREIQEHLIIKLPKYSLFELENGRRRLLASASELQKGNELFLPVDYMTFLYLAAHYHELTGSSEDVLRKKYFVDRHLHYFDDIIQMINDFAERHILASSNLEKINHTYHNNSDLPVNERAENIINVFTFVALGAPAAFKFFDATIDRKRYTSTKEVLNATLIHQSVTGLYETRIDLSQLGEN

SEQ ID NO: 77 - protein, 1341 aa, Ruminococcus lactaris
MGKGYYVGLDMGTGSVGWAVTDESYQILRRHGKAMWGVRLFESAKTAEERRMFRTGRRRLDRRGWRIEILQEIFAEEISRVDPGFFLRMKESKYYPEDKRDIQGNCPELPYTLFVDKTFTDKDFHKKYPTIYHLRKMLMETEDTPDMRLVYLALHHMMKHRGHFLLSGDISQVTEFKNTFNQFIENIRNEEMDFEIELDESAVQMIEETLKDKNLTRSAKKSKLVKGLNAKNVRDKAFLTLLSGGTVKLSDLFGMEELNEGERPKISFADNGYEEYAAVVEMELGELYYIVESAKAVYDWAILSDILGGSTSVSDAKVRAYEKHKADLKYLKAVVKEYFPKEVYNAVFVESSDKLNNYPAYIGMTKKNGKKVSLEGKRCSREEFMDFLKKNIVVKLPDEEAKMYLQSELEKDSFLPKQVNKDNGVIPYQVHKYELKKILDNLGDKIPFLKENAEKIEKLFSFRIPYYVGPLRTGNGENSKFAWAERKSTEKIYPWNFENVIDVEQSAENFIRRMTNKCTYLIGEDVLPKDSLLYSKFMVLNELNNLRLDGQKISVELKQKIYRDVFCRSRKVTQKKLKSYLIREGIAGKNVELTGIDGDFKGSLTAYHDFKEKLIDVELTQKEKEEIILNIVLFGDDKKLLKQRLKKKFPQLTEKQINTVTALSYKGWGRLSKKLLEEVTVPAPETGEVWNIITALWETNDNFMQLLSKEYQFSDRIEEFNEEKADPEVSYQTIEDLYVSPAVKRQIWQTLQIIQEIEKVMGEKPKRVFVEMAREKQENKRTESRKKTLSDLYTKCKKEEPEWIEALCTSLEKHEEHQLRSDKLYLYYTQKGRCMYSGEPIDLEDLWDNTKYDIDHIYPQSKTMDDSLKNRVLVKKEYNAKKSDTYPIAADIQKKMMPFWKSLLTGGFIPKEKYDRLVRNNPLDANELAGFIERQIVETRQSTKAVAEILKKILPDTEIVYVKAKTVSKFRQDFDFIKVRDMNDLHHAKDAYLNIVVGNVYFVKFTKNAAWFVKENPGRTYNLEKMFIWDVARDGEIAWKAGKSGSIVQVRAMMEKNHILVTRRSYEVKGGLFDQQILKKGKGQVPVKESDERLRDIGKYGGYNKAAGVYFMLVSSKDKKGKEQRTIEFVPIYLKDRVEKDMESARNYLMEERGLREPKILIKKIKIDTLFKVDGFYMWLSGRTSNQLIFKGANQLILSKEDMKTLKKVVKYIQRQKEDKNVKISMRDGITEEELLKLYETFLDKIRHSIYGARLSSQEKTLVNGKEKFIDLSVEAKCQVLYEILHLFQCQSGAANLKMIGGPASAGILVMNNNISKCKNISIVNQSPTGIYEKEIDLLRV

SEQ ID NO: 78 - protein, 1003 aa, Gluconacetobacter diazotrophicus
MIDESLTFGIDLGIGSCGWAVLRRPSAFGRKGVIEGMGSWCFDVPETSKERTPTNQIRRSNRLLRRVIRRRRNRMAAIRRLLHAAGLLPSTDSDALKRPGHDPWELRARGLDKPLKPVEFAVVLGHIAKRRGFKSAAKRKATNISSDDKKMLTALEATRERLGRYRTVGEMFARDPDFASRRRNREGKYDRTTARDDLEHEVHALFAAQRRLGQGFASPELEEAFTASAFHQRPMQDSERLVGFCPFERTEKRAAKLTPSFERFRLLARLLNLRITTPDGERPLTVDEIALVTRDLGKTAKLSIKRVRTLIGLEDNQRFTTIRPEDEDRDIVARTGGAMTGTATLRKALGEALWTDMQERPEQLDAIVQVLSFFEANETITEKLREIGLTLAVLDVLLTALDAGVFAKFKGAAHISTKAARNLLPHLEQGRRYDEACTMAGYDHAASRLSHHGQIVAKTQFNALVTEIGESIANPIARKALIEGLKQIWAMRNHWGLPGSIHVELARDVGNSIEKRREIEKHIEKNTALRARERREVHDLLDLEDVNGDTLLRYRLWKEQGGKCLYTGKAIHIRQIAATDNSVQVDHILPWSRFGDDSFNNKTLCLASANQQKKRSTPYEWLSGQTGDAWNAFVQRIETNKELRGFKKRNYLLKNAKEAEEKFRSRNLNDTRYAARLFAEAVKLLYAFGERQEKGGNRRVFTRPGALTAALRQAWGVESLKKQDGKRINDDRHHALDALTVAAVDEAEIQRLTKSFHEWEQQGLGRPLRRVEPPWESFRADVEATYPEVFVARPERRRARGEGHAATIRQVKERECTPIVFERKAVSSLKEADLERIKDGERNEAIVEAIRSWIATGRPADAPPRSPRGDIITKIRLATTIKAAVPVRGGTAGRGEMVRADVFSKPNRRGKDEWYLVPVYPHQIMNRKAWPKPPMRSIVANKDEDEWTEVGPEHQFRFSLYPRSNIEIIRPSGEVIEGYFVGLHRNTGALIPTPVGPDSYVIA

SEQ ID NO: 79 - protein, 1368 aa, Streptococcus pyogenes
MDKKYSIGLDIGTNSVGWAVITDDYKVPSKKFKVLGNTDRHSIKKNLIGALLFDSGETAEATRLKRTARRRYTRRKNRICYLQEIFSNEIAKVDDSFFHRLEESFLVEEDKKHERHPIFGNIVDEVAYHEKYPTIYHLRKKLADSTDKADLRLIYLALAHMIKFRGHFLIEGDLNPDNSDVDKLFIQLVQTYNQLFEENPINASRVDAKAILSARLSKSRRLENLIAQLPGEKRNGLFGNLIALSLGLTPNFKSNFDLAEDAKLQLSKDTYDDDLDNLLAQIGDQYADLFLAAKNLSDAILLSDILRVNTEITKAPLSASMIKRYDEHHQDLTLLKALVRQQLPEKYKEIFFDQSKNGYAGYIDGGASQEEFYKFIKPILEKMDGTEELLAKLNREDLLRKQRTFDNGSIPHQIHLGELHAILRRQEDFYPFLKDNREKIEKILTFRIPYYVGPLARGNSRFAWMTRKSEETITPWNFEEVVDKGASAQSFIERMTNFDKNLPNEKVLPKHSLLYEYFTVYNELTKVKYVTEGMRKPAFLSGEQKKAIVDLLFKTNRKVTVKQLKEDYFKKIECFDSVEISGVEDRFNASLGTYHDLLKIIKDKDFLDNEENEDILEDIVLTLTLFEDREMIEERLKTYAHLFDDKVMKQLKRRRYTGWGRLSRKLINGIRDKQSGKTILDFLKSDGFANRNFMQLIHDDSLTFKEDLQKAQVSGQGDSLHEHIANLAGSPAIKKGILQTVKVVDELVKVMGRHKPENIVIEMARENQTTQKGQKNSRERMKRIEEGIKELGSDILKEYPVETTQLQNEKLYLYYLQNGRDMYVDQELDINRLSDYDVDHIVPQSFLKDDSIDNKVLTRSDKNRGKSDNVPSEEVVKKMKNYWKQLLNAKLITQRKFDNLTKAERGGLSELDKAGFIKRQLVETRQITKHVAQILDSRMNTKYDENDKLIREVRVITLKSKLVSDFRKDFQFYKVREINNYHHAHDAYLNAVVGTALIKKYPKLESEFVYGDYKVYDIRKMIAKSEQEIGKATAKYFFYSNIMNFFKTEITLANGEIRKRPLIETNGETGEIVWDKGRDFATVRKVLSMPQVNIVKKTEVQTGGFSKESILPKRNSDKLIARKKDWDPKKYGGFDSPTVAYSVLVVAKVEKGKSKKLKSVKELVGITIMERSSFEKDPVDFLEAKGYKEVRKDLIIKLPKYSLFELENGRKRMLASAGELQKGNELALPSKYVNFLYLASHYEKLKGSPEDNEQKQLFVEQHKHYLDEIIEQISEFSKRVILADANLDKVLSAYNKHRDKPIREQAENIIHLFTLTNLGAPAAFKCFDTTIGRNRYKSIKEVLDATLIHQSITGLYETRIDLSQLGGD

SEQ ID NO: 80 - protein, 1504 aa, Bacteroides dorei
MKNIVGLDLGTNSIGWAVVNGSVNDDGSEQLVKIQASGSRIIPMDAAMIGDFNKGNSISQTAERTRLRGVRRLSERYLLRRERLHRILDILGFLPFHFAQDLDRHGKIVKGKEPKLAWRKNEAGQFEFIFQDSFKEMLEDFKLNYPNLITDDKKVPYDWTIYYLRKKGLTSKISKEELAWILLNFNQKRGYYQLRGEEEEENKDKLVEFYALKVVAVEDSGEKKGKDIWYNVHLENGWVYRRTSNMSLDWVGKTKEFIVTTDLEKDGTPKKDKEGNVKRSFRAPKEDDWSLVKKKTEADIDQTHKTVGAYIYDTLLGNPSQKIRGRLVRTIERKYYKEELKLILEKQKEFHLELQDRALYAACIEELYPINEAHRNNVGNRDFTYLFLEDILFYQRPLKSKKSLIDNCPYEENQGLDKETGEIKSFPVKCIAKSHPLFQEFRLWQFIINLRIYRKDLAQDVDVTNELLKTEEDYVALFDWLNGKKEIDQKAFLKYPVFGLKKEIENYRWNYVQDKPYPCNETRSLMLARLEKCDISIEFLTKENEEALWHILYSVEDKNEIVKALQKFADKHDLNASFVDVFQKFPPFKKEYGSYSAKAIKKLLPLMRMGKYWSENSIDKGTRERIDKIITGEYDEKIENRVREKAIHLADVSDFKGLPLWLVCYIVYGRHSEAKEIIQWKSPADIDSYLRSFKQHSLRNPIVEQIIIETLRVVRDIWKQVGNIDEIHVELGREMKNPADKRKKMTQQMSENENTNLRIKYLLTEFLNPEYEVENVRPYSPSQQDILRIYEEGVLNSVSDLPEEISDILKKFTETDLKKRPSRSEVLRYKLWLEQKYRSPYTGEVIPLGKLFTPAYEIEHVIPQSYYFDDSFSNKVICEAEVNKLKSNLLGHEFIVKHHGEIVELPFGKKVRIFTVDEYEQFVKDNYSRTRSKMKKLLMDDIPEEFVTRQLNDSRYISKVVKSLLSNIVREKGEEEAISKNVIPCTGGVTDRLKKDWGINEVWNKIILPRFQRLNELTGTNKFTTKNVGIQEIPTMPLELQKGFNKKRIDHRHHAMDAIIIACANRNIINYLNNKSATAKAELSRYDLQKMLCDKAKTDNNGNYKWVIRKPWASFTQDTYLALENIIVSFKQNLRVINKATNRFLHYNEEGKKIFVKQGKGDNWAIRKSMHKDTVFGEVNLRRIKTVALNEAMKNPQSIVVKDFKRKLLELWNLGFDAKRIKKYFEDNRETWSDINLSKIEVYYFSKDTKDRFFATRKPLDTSFDRKKIENNITDTGIQKILLRHLELKDNNPDIAFSPDGIDEMNRNIIQLNNGKYHQPIIKIRWYEQADKFAVGQTGNKSSKFVEAAKGTNLFFAVYESNILDKKTNTIIKKRNYATIPLNVAIERQKQGLPVAPEDENGNDPIFVLSPNDLVYLPTDDELANGIIAQPLDRGRIYKMVSSSGEQCFFIKHIVANVLVDKFEFSPLNKMERALTGEMIKMICIPIKVDRLGNVLESSSSYKK

SEQ ID NO: 81 - protein, 1426 aa, Capnocytophaga sputigena
MKNILGLDLGITSISFAHIVEDENKEKSEIKELGVRIVSLTTDEQSDFEKGKSITTNANRTLKHGARLNLDRYQQRRKYLIDLLQKANLITSSSILAENGKNTTHSTWQLRAKAVTERIEKEEFARVLLAINKKRGYKSSRKAKTEDEGQAIDGMAIAKRLYDENLTPGQLSLQLLQQNKKLLPDFYRSDLQREFDLVWNFQKQFYPDILTDSFYKELQGKGKDATSKAFSKRYHFDTAENKGSKESVRLQAYQWRAEAISKQLSKEEVAYVLTEINNNLNNASGYLGAISDRSKELYFNRQTVGQYLYAQLQENRHNSLKNKVFYRQDYLDEFERIWETQASFHKELTDELKKQIRDVVIFYQRKLKSQKGLISFCEFESKEIEIEKDGKTITKTIGARVVPKSSPLFQEFKIWQILNNVTCKRKGIRKKKSSAKSTELDLFNEPSQTIFSLDMECKQLLFDELNLKGDLKSDKVLKLLGYSPQEWEINYNQLEGNRTQKALYEAYLKIVEMEAHDVKDILQIKSAKDDWSLDESPLSASEIKEKVKDIFQALGICTKILYFDPLLPVKEFEKQDSYQLWHLLYSYESDDSTSGNETLYRILEKKYAFKREHARILANVALQDDYGSLSTKAIRKIYPNIKENQYSKACELAGYKHSKLSLTTEELEARELKNIIPLLKKNALRNPVVEKILNQMINVVNALIEKNSERDAEGKITKYFHFDEIRIELARELKKNAQKRYEMTQNINKAKLEHQKISEILQKKFGIKNPTKSDIIRYRLYQELEHNGYKELYTNAPIARDMLFSKNIEIEHIVPKARVFDDSFSNKTLTFHRINSNKGEYTAFDYITSLNSEEELNQYLTRVENAYKTKSISLTKYKNLLKKASEIGDGFINRDLRDTQYIAKKAKEILFQVTKNVLSTSGSITDRLREDWGLVDVMKELNMPKYQSLGLTEVEERKEGNKVTVIKNWTKRNDHRHHAMDALTVAFTKPSYIQYLNHLNARKDENNKNYSVILAIEEKETIKVPTNNGKNKRVFIEPIPNFRQVAKKHLEEIFISHKAKNKVVTKNVNKPAGTDKQQITLTPRGQLHKETIYGKYQYYVNKEEKVGVKFDERTITKVSNPLYREALLKRLQANDNDPKKAFTGKNALSKNPIYLDETKTKTLPEKVNLTYLEEDFSIRKDISPDNFKDLKSIEKVIDQGVKRILIKRLQDYDNDPKKAFVDLEKNPIWLNKEKGIAIKRVTISGVSNAQPLHIGKDHLGKTTLNKEGNEIPVDYVSTGNNHHVAIYRDKEGNLQEQIVSFFEAVVRTQQGLPIIDKTYKQEEGWQFLFTMKQNEMFVFPNATTGFNPAEIDLLDPKNKKLISPNLFRVQKIATKDYFFRHHLETNVETDNVLKNTTWKREGLSGLKDIVKVRINHLGDIVSIGEY

SEQ ID NO: 82 - protein, 1443 aa, Parabacteroides johnsonii
MIKLLYLEKLKQYTMKKILGLDLGTSSIGWALVNEAENSDEVSSIIKLGVRVNPLTVDEMQNFEKGKSITTNADRTLKRSMRRNLQRYKLRRDALIELLKKVGFITDKTILSEQGNRTTFETYRLRAKAAEEEISLKELARVLLMINKKRGYKSSRKAKGEEEGALIDGMEIAKKLYDEDLTPGQLCLQLLESGKKFFPDFYRSDLQEEFNKIWDFQKQFNLFSFCDVAKEEVKGKNKSQTWAILAKYFVETKKVNVWNEHEAQTENREEVYKLVGLKRTVKGEELKKENYRWRVQALTEQLDLEKIAVVLQEINGQISASSGYLGAISDRSKVLYFNRQTVGQYQMAELNKNPNMSLRNMVFYRQDYLDEFNVIWEKQAEFHKELTPELKKEIRDIIIFYQRRLKSQKGLISFCEFENREVVVEKEGKKQTKIIGCKVIPRSHPLFQEFKIWQTLNNIEVFVGEKKGKRKKSNVSSDLFGDTEDALITEGRRFLYQEEKKILAKELSIKKGLTKAEILRLLFENPQELDINFKQIDGNQTGFALFSAYSNMIEKYGYEPLDFKKPAEDLISQLKTVFTDLGWNTDLLFIDLDKENKEWEKQPYFRLWHLLYSFEGDNTPTGNGKLIEKIMQLCGIEKEYAIELANVSLQDDYGSLSAKAIKKILLYLKEGNQYDMACEYAGYRHSKSSLTKEEIENKVLKDKLEILPKNSLRNPVVEKILNQMVNVINTVMEVYGRPDEIRVELARELKKSAKEREELTKAVAKNTREHEEIRKVLQSEFGMINVSRNDIIRYKLYEELKDNGYKTLYSNQYIPREKLFSKEIDIEHIIPQSRLFDDSLSNKTLEYKSINIEKGNKTAYDFVKEKYGEEGLQQYLNRCENLCKDKKAKLRKLKMELNEIPDGFIDRDLRNTQYIAKKALSMLTEICRRVVATTGSITDKLREDWQLVDVMKELNLPKYEALGLVEVYEDKDGRKIKRIKDWTKRNDHRHHAMDALTVAFTKDVFIQYFNNKNAAWESDSKEHTNIVGIKTRYFESGKAVPPIPLGQFRVEAKCHLENLLVSIKAKNKVVTTNVNCIKKKGGTYKNTQQTPRGQLHLETIYGSHNQYVTKIEKVNASFDAVKIATVSKQDYRNALLKRLEVFGNDPKKAFTGKNSLEKNPIYLDRAQTIQVPDKVQTVELETAYTIRKPVDPTLNVDKVVDKKIRLILEQRLKEYGGDAKKAFVNLDENPIWLNEEKGISIKRVTIRGISKAQALHDKKDKDGNFILDETGKRIPVDFVNTGNNHHVAIYRKPVLDKKGQVIFDDEGNPMYELDEDVVPFFEAVTRANLGIPIIDKDYKKSEGWQFLFSMKQNEYFVFPNEKTGFNPKEVDLLDPDNYAMISPNLFRVQKIGLNDYTFRHHLETTIQNDLKFITWIRCGKSGIKDIVKVRINHIGQIVSVGEY

SEQ ID NO: 83 - protein, 984 aa, Campylobacter jejuni
MARILAFDIGISSIGWAFSENDELKDCGVRIFTKVENPKTGESLALPRRLARSARKRLARRKARLNHLKHLIANEFKLNYEDYQSFDESLAKAYKGSLISPYELRFRALNELLSKQDFARVILHIAKRRGYDDIKNSDDKEKGAILKAIKQNEEKLANYQSVGEYLYKEYFQKFKENSKEFTNVRNKKESYERCIAQSFLKDELKLIFKKQREFGFSFSKKFEEEVLSVAFYKRALKDFSHLVGNCSFFTDEKRAPKNSPLAFMFVALTRIINLLNNLKNTEGILYTKDDLNALLNEVLKNGTLTYKQTKKLLGLSDDYEFKGEKGTYFIEFKKYKEFIKALGEHNLSQDDLNEIAKDITLIKDEIKLKKALAKYDLNQNQIDSLSKLEFKDHLNISFKALKLVTPLMLEGKKYDEACNELNLKVAINEDKKDFLPAFNETYYKDEVTNPVVLRAIKEYRKVLNALLKKYGKVHKINIELAREVGKNHSQRAKIEKEQNENYKAKKDAELECEKLGLKINSKNILKLRLFKEQKEFCAYSGEKIKISDLQDEKMLEIDHIYPYSRSFDDSYMNKVLVFTKQNQEKLNQTPFEAFGNDSAKWQKIEVLAKNLPTKKQKRILDKNYKDKEQKNFKDRNLNDTRYIARLVLNYTKDYLDFLPLSDDENTKLNDTQKGSKVHVEAKSGMLTSALRHTWGFSAKDRNNHLHHAIDAVIIAYANNSIVKAFSDFKKEQESNSAELYAKKISELDYKNKRKFFEPFSGFRQKVLDKIDEIFVSKPERKKPSGALHEETFRKEEEFYQSYGGKEGVLKALELGKIRKVNGKIVKNGDMFRVDIFKHKKTNKFYAVPIYTMDFALKVLPNKAVARSKKGEIKDWILMDENYEFCFSLYKDSLILIQTKDMQEPEFVYYNAFTSSTVSLIVSKHDNKFETLSKNQKILFKNANEKEVIAKSIGIQNLKVFEKYIVSALGEVTKAEFRQREDFKK

SEQ ID NO: 84 - protein, 1082 aa, Neisseria meningitidis
MAAFKPNPINYILGLDIGIASVGWAMVEIDEDENPICLIDLGVRVFERAEVPKTGDSLAMARRLARSVRRLTRRRAHRLLRARRLLKREGVLQAADFDENGLIKSLPNTPWQLRAAALDRKLTPLEWSAVLLHLIKHRGYLSQRKNEGETADKELGALLKGVADNAHALQTGDFRTPAELALNKFEKESGHIRNQRGDYSHTFSRKDLQAELILLFEKQKEFGNPHVSGGLKEGIETLLMTQRPALSGDAVQKMLGHCTFEPAEPKAAKNTYTAERFIWLTKLNNLRILEQGSERPLTDTERATLMDEPYRKSKLTYAQARKLLGLEDTAFFKGLRYGKDNAEASTLMEMKAYHAISRALEKEGLKDKKSPLNLSPELQDEIGTAFSLFKTDEDITGRLKDRIQPEILEALLKHISFDKFVQISLKALRRIVPLMEQGKRYDEACAEIYGDHYGKKNTEEKIYLPPIPADEIRNPVVLRALSQARKVINGVVRRYGSPARIHIETAREVGKSFKDRKEIEKRQEENRKDREKAAAKFREYFPNFVGEPKSKDILKLRLYEQQHGKCLYSGKEINLGRLNEKGYVEIDHALPFSRTWDDSFNNKVLVLGSENQNKGNQTPYEYFNGKDNSREWQEFKARVETSRFPRSKKQRILLQKFDEDGFKERNLNDTRYVNRFLCQFVADRMRLTGKGKKRVFASNGQITNLLRGFWGLRKVRAENDRHHALDAVVVACSTVAMQQKITRFVRYKEMNAFDGKTIDKETGEVLHQKTHFPQPWEFFAQEVMIRVFGKPDGKPEFEEADTPEKLRTLLAEKLSSRPEAVHEYVTPLFVSRAPNRKMSGQGHMETVKSAKRLDEGVSVLRVPLTQLKLKDLEKMVNREREPKLYEALKARLEAHKDDPAKAFAEPFYKYDKAGNRTQQVKAVRVEQVQKTGVWVRNHNGIADNATMVRVDVFEKGDKYYLVPIYSWQVAKGILPDRAVVQGKDEEDWQLIDDSFNFKFSLHPNDLVEVITKKARMFGYFASCHRGTGNINIRIHDLDHKIGKNGILEGIGVKTALSFQKYQIDELGKEIRPCRLKKRPPVR

SEQ ID NO: 85 - protein, 1021 aa, Clostridium cellulolyticum
MKYTLGLDVGIASVGWAVIDKDNNKIIDLGVRCFDKAEESKTGESLATARRIARGMRRRISRRSQRLRLVKKLFVQYEIIKDSSEFNRIFDTSRDGWKDPWELRYNALSRILKPYELVQVLTHITKRRGFKSNRKEDLSTTKEGVVITSIKNNSEMLRTKNYRTIGEMIFMETPENSNKRNKVDEYIHTIAREDLLNEIKYIFSIQRKLGSPFVTEKLEHDFLNIWEFQRPFASGDSILSKVGKCTLLKEELRAPTSCYTSEYFGLLQSINNLVLVEDNNTLTLNNDQRAKIIEYAHFKNEIKYSEIRKLLDIEPEILFKAHNLTHKNPSGNNESKKFYEMKSYHKLKSTLPTDIWGKLHSNKESLDNLFYCLTVYKNDNEIKDYLQANNLDYLIEYIAKLPTFNKFKHLSLVAMKRIIPFMEKGYKYSDACNMAELDFTGSSKLEKCNKLTVEPIIENVTNPVVIRALTQARKVINAIIQKYGLPYMVNIELAREAGMTRQDRDNLKKEHENNRKAREKISDLIRQNGRVASGLDILKWRLWEDQGGRCAYSGKPIPVCDLLNDSLTQIDHIYPYSRSMDDSYMNKVLVLTDENQNKRSYTPYEVWGSTEKWEDFEARIYSMHLPQSKEKRLLNRNFITKDLDSFISRNLNDTRYISRFLKNYIESYLQFSNDSPKSCVVCVNGQCTAQLRSRWGLNKNREESDLHHALDAAVIACADRKIIKEITNYYNERENHNYKVKYPLPWHSFRQDLMETLAGVFISRAPRRKITGPAHDETIRSPKHFNKGLTSVKIPLTTVTLEKLETMVKNTKGGISDKAVYNVLKNRLIEHNNKPLKAFAEKIYKPLKNGTNGAIIRSIRVETPSYTGVFRNEGKGISDNSLMVRVDVFKKKDKYYLVPIYVAHMIKKELPSKAIVPLKPESQWELIDSTHEFLFSLYQNDYLVIKTKKGITEGYYRSCHRGTGSLSLMPHFANNKNVKIDIGVRTAISIEKYNVDILGNKSIVKGEPRRGMEKYNSFKSN

SEQ ID NO: 86 - protein, 1131 aa, Acidovorax sp.
  source 1..1131: note = provisionally referred to as Acidovorax ebreus
MAQHVFGLDIGIASVGWAILGEQRIIDLGVRCFDKAETAKEGDPLNLTRRQARLLRRRLYRRAWRLTQLSRLLKRKGLIADAKLFAKAPSYGDSAWELRRQGLDRLLTPLEWARVIYHQCKHRGFHWTSKAEEAKADSDAEGGRVKQGLAHTKALMQAKNYRSAAEMVLAEFPDAQRNKRGQYDKALSRVLLGEELALLFATQRRLGNPHASDFFEKLILGDGDRKSGLFWQQKPALSGADLLKMLGKCTFEKGEYRAPKASFSVERHVWLTRLNNLRIVVDGRSRPLNEAERQAALLLPYQTETSKYKTLKNAFIKAGLWGDGVRFGGLAYPSQAQIDAEKTKDPEDQFLVKLPAWHELRKAFKAAGHEALWQQISTPALDGDPTLLDQIATVLSVYKDGAEVVQQLRQLALPEPAASIAVLEKISFDKFSSLSLKALRRIVPLMQSGLRYDEAVAQIPEYGHHSQRIEPGAAKHLYLPPFYEAQRKYAGKGDHIGSMQFRDDADIPRNPVVLRALNQARKVVNALIREYGSPIAVNIEMARDLSRPLDERNKVKRAQEEFRDRNDRARSEFERDFGYKPKAAAFEKWMLYREQLGQCAYSQQPLDIQRVLDDHNYAQVDHALPYSRSYDDSKNNKVLVLTHENQNKGNRTAFEYLTSFPDGEDGERWRTFVAWVQGNKAYRMAKRNRLLRKNYGVDESKGFIDRNLNDTRYICKFFKNYVEEHLQLAARADGDTARRCVVVNGQLTAFLRARWGLTKVRGDSDRHHALDAAVVAACTHGMVKALADYSRRKEISFLQEGFPDPETGEILNPAAFDRARQHFPEPWTHFAHELKARLFTDDLAALREDMQRLGSYTTEDLGRLRTLFVSRAPQRRSGGAVHKETIYAQPESLKQQGGVIEKILLTSLKLQDFDKLLNPESNDHFVEPHRNERLYAAIRQRLEQFGGRADKAFGPDNLFHKPDKNNQPTGPVVRSIKLVRGKQTGIPIRGGLAKNDSMLRVDIFTKAGKFHLVPVYVHHRVTGLPNRAIVAFKDEDEWTLIDESFAFLFSVYPNDYVKVTLKKEQQSGYYSGADRSTGAMNLWAHDRAASVGKDGLIRGIGVKTALSVEKFNVDVLGRIYLAPPETRSGLA

SEQ ID NO: 87 - protein, 1122 aa, Streptococcus suis
MSNGKILGLDIGIASVGVGVIDAQTGEIIHASSRIFPSANAANNAERRTFRGSRRLIRRKKHRIKRLDDLFNDFHINLDGEMSTDNPYVLRVKGLSQKLTVEELYISIKNIMKRRGISYLDDAESDNEAGRSDYAKAIERNRQLLTSKTPGEIQLERLEKYGQLRGNFTIIDEEGQSQQIINVFSTSDYVKEVEKILDCQKMYHKFISDEFCDKLIELLREKRKYYVGPGNEKSRTDYGIYRTDGTTLENLFGILIGKCTFYPDQYRSSRASYTAQEFNFLNDLNNLTVPTETKKLSQEQKEFLVNYAKETSVLGAGKILQQIAKLADCKVEDIRGYRLDNKDKPELHTFETYRAMKGLVPLVDIGVLSREQLDILADILTLNTDFEGIREALKKQLPNVFDEKQVKGLASFRKSKSQLFAKGWHNLSQKIMLEVIPELYATSDEQMTILTRLGKFEKSSVAEYPSSINVDEITDEIYNPVVAKSIRQTIKIINASIKKWGEFDQIVIEMPRDRNEDEEKKRIADGQKANAKEKADSILRAAELYCAGKVLPDYVYNGHNQLATKIRLWYQQGERCIYTGQPISIHDLIHNQNQYEIDHILPLSLTFDDSLSNKVLVLATANQEKAQRTPYNYLKSATSAWSYREFKDYVTKRKGIGKKKCEYLTFEEDINGFEVRSKFIQRNLVDTRYASKVILNALQDYFKISGIQTKVSVVRGQFTSQLRHKWGIEKTRETYHHHAVDALIIAASSQLRLWKKQESPLVVDYQEGRQVDLETGEILELTDEQYKELVYQPPYQGFVNTISSSAFDNEILFSYQVDSKVNRKISDATIYATRNAQLGKDKTEGIYVLGKIKDIYTQAGYEAFLKRYTKDKTSFLMYHKDLDTWEKVIEIILRDYREYDEKGKEIGNPFERYRRENGYVKKYSRKGNGTAIKSLKYYDNKLGNHIDITPENSRNAVVLQSLKPWRTDVYFNKETGKYEFLGIKYSDLSFEKGTGEYGISQEKYDSIKIAEGVAKKSIFKFTLYKQDLLFIKDIENNFGKLLRFTSKNDTSKHYVELKPYDKNKFGTEEPLLPVLGNVAKSGQCIKGLNKSNISIYKVRTDILGYRHFIKQEGEHPQLKFKK

SEQ ID NO: 88 - protein, 1509 aa, Bacteroides coprophilus
MKKTLGLDLGTNSIGWAVINSNIDSEGKEKLVGISSCGSRIIPMDATTLGDFGKGNTKSPVAERTRLRGIRRLLERSLLRRERLHRVLSVMGFLPEHYASQLDRYGKFLPETEPKLAWYKDDSGRYQFLFQKSFHEMLEDFRQHQPELVAGEKKIPYDWTIYYLRKKALSQEITKEELAWILLNFNQKRGYYQLRGEEEQEENNKSVEYHALKVVSVEDSGERKGKDIWYNVTLENGWVYRRASNIPLDWTGKVKEFVVTTELDDAGNPKKDKEGNVKRSFRAPKEDDWGLLKTRTQAQIDESGKTVGTYIYESLLCMPNQKIRGKLVRTIERKYYKDELRQILVKQSEFHAALQDHNLLLSCIEELYPNNEAHRRLLSASSFIYFLIEDILFYQRPLKSQKGLIDNCPYESHIYKDKKDGSLHHVPLKCVSKSHPLFQEFRLWQFLSNLRIYQRERMMDGSLKLDVDVTREFLPSEEDYVKLFDWLNERKEISQKFLLAYKPFGLKKNEQANYRWNYVEDKSYPCNETRAEIKSRLSKAGVPEEFLTEEKEEALWHILYSISDKKELTKALGTFAAKNCLNESFVEVFAKIPPFESNYAAYSLKAIRKLLALMRMGKYWNEQAIDRQTRDRIEKILTGEYDETIRSRVREKAMLLTDISSFRGLPLWLACYIVYDRHSESKELVKWETPADIDHFLSKFKQNSLRNPIVEQVITESLRTVRDIWKQEGKIDEIHVELGREMKNPAKERARITAQVQENENTNLRIKALLAEFMNPEFEIENVHPYSPGQQEILRIYEDGVLSGIAEKDLPDDITAILKKFRENDVKKRPTTSEVLRYKLWLEQRYRSPYTGRVIPLGKLFTPAYEIEHVIPQSRYFDDSISNKVICESAVNKLKDNCLGYEFIKKHSGEMVELGNGETVPVFSVEEYERFVKESYFGNSKKMKKLLLEDIPDSFIERQLNDSRYISRVVTSLLSNLVCEEGEQDGLSKNVIVCTGGITDRLKKDWGVQEVWNRIILPRFLRLNEITGRTDFTSTSVNGHLLPALPLYLQKGFNKKRIDHRHHAMDAIVIACANRNIVNYLNNSSARKNSEISRYDLQRLLCEKVKTDANGNYKWILRKPWETFTQDVYAALTNIVVSFKQNLRVINRTTNYYQHYNEAGEKRMIPQTKGDRWAIRKPMHKDTVYGEVNLRKEKTLPLRDVVKNPSIVVDKSLKNKLYELLKSQYDLKAIAKYFETHQDVWADVNLKKIKVYYFTKETNERFFATRKSLDPSFDQKKIEEEVTDTGVQKILLHHLQQNNNDPDMAFSPDGIDRMNQNMTILNDGKWHQPIYKVRTYEKADKFAVGESGNKAKKFVEAAKGTNLFFAVYESVQEDEAIGKQVCKRTFATIPLNEVIKRKKQGLPAAPEDLNGNLPKFVLSPNDLVYLPTEEERNSSRIIQPLDRERIYKMVSSSGSQCFFIKVFVANSIWDKNEYSSLNKMERAITNEMIKEICVPIKIDRLGNVSLIQI

SEQ ID NO: 89 - protein, 1219 aa, Bacteroides cellulosilyticus
MKEEVRGKNRSQTWAILAKFFVWSEKESVWNEKEARTEERVKEYKLVGLKRDTKGNELKLENYRWRVQALSEQLNPEIVAIVLQEINGQISASSGYLGAISDRSKQLYFNRQTVGQYLMSELEKDPNVSLRNRVFYRQDYLDEFDRIWEKQAEFHEELTVELKKEIRDIIIFYQRRLKSQKGLISFCEFEKREVVVEEDGRKKNKTVGCRVIPRSHPLFQEFKIWQTLNDIEVFAWDKQSKRKKADKSSILFDNSEDALLVEGKRFLYQEEKELLAKELFVKESMKKAEVLKLLFENYQELDLNFKQIDGNHTGFALFSAYSKMIEKYGYEPVDFKRSADEIIEKLETIFTNLGWNTELLSIDLSKEDKELERQSYFRLWHLLYSFEGDNTPTGNGKLLEKIMQLCDVEKEYAVELANVSFQEDYGSLSAKAIKKILPYLKEGNQYDVACDYAGYRHSRSSLTKDEIENKILKDKLEILPKNSLRNPVVEKILNQMVNLINTLIDTYGKPDEIRVELARELKKNAKEREELTKSIARNTREHDEIRQLLRTEFGMMNVSRNDIIRYKLYEELKDNGYKTLYSNEYIPREKIFSKEIDIEHVIPQARLFDDSLSNKTLEYRAINIEKGNKTAYDFVKEKYGNDGLEKFLNRCETLFKDKRTKLRKLKMEEKDIPEGFIDRDLRNTQYISKKAFAMLNEISRRVVATTGSITDKLREDWQLVDLMKELNLPKYEKLGMVEMFEDKDGRKIKKITDWTKRNDHRHHAVDALTVAFTKDVFIQFYNNKNAAWMPASKEHANITGIKARYFENGKALAPMPLAQFRAEAKRHLENLLVSIKAKNKVITSNVNRTKNKNGENRKLQQTPRGQLHLETVYGSHRQYATKIEKVNAAFDVTKIATVSKLAYRNALLKRLEAFGNDPKKAFTGKNTLEKNPLYLDENQTEMVPEKVQTVEFETVYTIRKPIDPNLSIDKVVDVKIRSVLEKRLKEYGGDAKKAFVNLDENPIWLNEAKGISIKRVSIRGISNAQSLHEKKDKDGNLILGKEGRKIPVDFVNTGNNHHVAIYKKPVLDKVGQVVLDEEGNPKYELDEVVVSFFDAVTRANLGQPIIDKDYRRSEGWQFLFSMKQNEYFVFPNDKTGFNPKEVDLLNPENYALISPNLFRVQKFAYKNYVFRHHLETTIKDTSSTLKGITWTDFRSSKGLDKIVKVRVDHIGQIVSIGEY

SEQ ID NO: 90 - protein, 1329 aa, Catenibacterium mitsuokai
IVDYCIGLDLGTGSVGWAVVDMNHRLMKRNGKHLWGSRLFSNAETAANRRASRSIRRRYNKRRERIRLLRAILQDMVLEKDPTFFIRLEHTSFLDEEDKAKYLGTDYKDNYNLFIDEDFNDYTYYHKYPTIYHLRKALCESTEKADPRLIYLALHHIVKYRGNFLYEGQKFNMDASNIEDKLSDIFTQFTSFNNIPYEDDEKKNLEILEILKKPLSKKAKVDEVMTLIAPEKDYKSAFKELVTGIAGNKMNVTKMILCEPIKQGDSEIKLKFSDSNYDDQFSEVEKDLGEYVEFVDALHNVYSWVELQTIMGATHTDNASISEAMVSRYNKHHDDLKLLKDCIKNNVPNKYFDMFRNDSEKSKGYYNYINRPSKAPVDEFYKYVKKCIEKVDTPEAKQILNDIELENFLLKQNSRTNGSVPYQMQLDEMIKIIDNQAEYYPILKEKREQLLSILTFRIPYYFGPLNETSEHAWIKRLEGKENQRILPWNYQDIVDVDATAEGFIKRMRSYCTYFPDEEVLPKNSLIVSKYEVYNELNKIRVDDKLLEVDVKNDIYNELFMKNKTVTEKKLKNWLVNNQCCSKDAEIKGFQKENQFSTSLTPWIDFTNIFGKIDQSNFDLIENIIYDLTVFEDKKIMKRRLKKKYALPDDKVKQILKLKYKDWSRLSKKLLDGIVADNRFGSSVTVLDVLEMSRLNLMEIINDKDLGYAQMIEEATSCPEDGKFTYEEVERLAGSPALKRGIWQSLQIVEEITKVMKCRPKYIYIEFERSEEAKERTESKIKKLENVYKDLDEQTKKEYKSVLEELKGFDNTKKISSDSLFLYFTQLGKCMYSGKKLDIDSLDKYQIDHIVPQSLVKDDSFDNRVLVVPSENQRKLDDLVVPFDIRDKMYRFWKLLFDHELISPKKFYSLIKTEYTERDEERFINRQLVETRQITKNVTQIIEDHYSTTKVAAIRANLSHEFRVKNHIYKNRDINDYHHAHDAYIVALIGGFMRDRYPNMHDSKAVYSEYMKMFRKNKNDQKRWKDGFVINSMNYPYEVDGKLIWNPDLINEIKKCFYYKDCYCTTKLDQKSGQLFNLTVLSNDAHADKGVTKAVVPVNKNRSDVHKYGGFSGLQYTIVAIEGQKKKGKKTELVKKISGVPLHLKAASINEKINYIEEKEGLSDVRIIKDNIPVNQMIEMDGGEYLLTSPTEYVNARQLVLNEKQCALIADIYNAIYKQDYDNLDDILMIQLYIELTNKMKVLYPAYRGIAEKFESMNENYVVISKEEKANIIKQMLIVMHRGPQNGNIVYDDFKISDRIGRLKTKNHNLNNIVFISQSPTGIYTKKYKL

SEQ ID NO: 91 - protein, 1152 aa, Roseburia inulinivorans
MNAEHGKEGLLIMEENFQYRIGLDIGITSVGWAVLQNNSQDEPVRITDLGVRIFDVAENPKNGDALAAPRRDARTTRRRLRRRRHRLERIKFLLQENGLIEMDSFMERYYKGNLPDVYQLRYEGLDRKLKDEELAQVLIHIAKHRGFRSTRKAETKEKEGGAVLKATTENQKIMQEKGYRTVGEMLYLDEAFHTECLWNEKGYVLTPRNRPDDYKHTILRSMLVEEVHAIFAAQRAHGNQKATEGLEEAYVEIMTSQRSFDMGPGLQPDGKPSPYAMEGFGDRVGKCTFEKDEYRAPKATYTAELFVALQKINHTKLIDEFGTGRFFSEEERKTIIGLLLSSKELKYGTIRKKLNIDPSLKFNSLNYSAKKEGETEEERVLDTEKAKFASMFWTYEYSKCLKDRTEEMPVGEKADLFDRIGEILTAYKNDDSRSSRLKELGLSGEEIDGLLDLSPAKYQRVSLKAMRKMQPYLEDGLIYDKACEAAGYDFRALNDGNKKHLLKGEEINAIVNDITNPVVKRSVSQTIKVINAIIQKYGSPQAVNIELAREMSKNFQDRTNLEKEMKKRQQENERAKQQIIELGKQNPTGQDILKYRLWNDQGGYCLYSGKKIPLEELFDGGYDIDHILPYSITFDDSYRNKVLVTAQENRQKGNRTPYEYFGADEKRWEDYEASVRLLVRDYKKQQKLLKKNFTEEERKEFKERNLNDTKYITRVVYNMIRQNLELEPFNHPEKKKQVWAVNGAVTSYLRKRWGLMQKDRSTDRHHAMDAVVIACCTDGMIHKISRYMQGRELAYSRNFKFPDEETGEILNRDNFTREQWDEKFGVKVPLPWNSFRDELDIRLLNEDPKNFLLTHADVQRELDYPGWMYGEEESPIEEGRYINYIRPLFVSRMPNHKVTGSAHDATIRSARDYETRGVVITKVPLTDLKLNKDNEIEGYYDKDSDRLLYQALVRQLLLHGNDGKKAFAEDFHKPKADGTEGPVVRKVKIEKKQTSGVMVRGGTGIAANGEMVRIDVFRENGKYYFVPVYTADVVRKVLPNRAATHTKPYSEWRVMDDANFVFSLYSRDLIHVKSKKDIKTNLVNGGLLLQKEIFAYYTGADIATASIAGFANDSNFKFRGLGIQSLEIFEKCQVDILGNISVVRHENRQEFH

SEQ ID NO: 92 - protein, 686 aa, Coprococcus comes
MKKQDSPKNNMGYTAYNLNVLGYEEFAKRVELLFKDTDAVKRLNDSHMQMAEGFDLNALPGSPALRRGVSQAIKVLDDIVSVAGKAPDRIYLKVTRTASNSRKGKRTAKRSDKIKQALKALDADAAADLGAAKLLRELGMFDEKEINERIYLYFHQAGKCLYTGKPIDITRIASNDYYVDHVVPLAYRKDESLDNKVLVYAEASRYKSETLLVSPAVQRKMLPFWRMLRNAGLMSERKLNALIRTEISEGMLKSIIGRQFTENSWEAKLFTAAIAAKYPGTVVIPVKAGVIGAVRSRIGIPKSLKANQFYHAHDALLAAEVGRYMELAKPAFVHNRVKYEQYMRKIKLVNEENKKAPKSQLDFFAGGFFFDRVDKDTGEVYWNKDEEVERIYRACGWKNLRVTYAAFEDGGAFWKQTIYSPREKSKLIATKSDRPAEIYGGYSSQTFANFFVYEVMKKKVKQLRFGAVPAAIASKSDPDTYNAMLEMYARGLAKTAKEKFVRIVRARVLKNTMIELYGERFRIAGEKQVYPVRQMPLAIDEVYLLKGVETIAAAGNAGASAKIDFEKAAESLVGFWDLLLEKLPVNYPKLTVQLKLGLLKHPKDILAATSESEFPAIVYKIAEAEIQVMEQASGLRNMSDTKILGGNTFGGSLVFTFNKVLNDPKSKACFIDTTPAGLYEVKTKIW

SEQ ID NO: 93 - protein, 1105 aa, Actinomyces coleocanis
MDNKNYRIGIDVGLNSIGFCAVEVDQHDTPLGFLNLSVYRHDAGIDPNGKKTNTTRLAMSGVARRTRRLFRKRKRRLAALDRFIEAQGWTLPDHADYKDPYTPWLVRAELAQTPIRDENDLHEKLAIAVRHIARHRGWRSPWVPVRSLHVEQPPSDQYLALKERVEAKTLLQMPEGATPAEMVVALDLSVDVNLRPKNREKTDTRPENKKPGFLGGKLMQSDNANELRKIAKIQGLDDALLRELIELVFAADSPKGASGELVGYDVLPGQHGKRRAEKAHPAFQRYRIASIVSNLRIRHLGSGADERLDVETQKRVFEYLLNAKPTADITWSDVAEEIGVERNLLMGTATQTADGERASAKPPVDVTNVAFATCKIKPLKEWWLNADYEARCVMVSALSHAEKLTEGTAAEVEVAEFLQNLSDEDNEKLDSFSLPIGRAAYSVDSLERLTKRMIENGEDLFEARVNEFGVSEDWRPPAEPIGARVGNPAVDRVLKAVNRYLMAAEAEWGAPLSVNIEHVREGFISKRQAVEIDRENQKRYQRNQAVRSQIADHINATSGVRGSDVTRYLAIQRQNGECLYCGTAITFVNSEMDHIVPRAGLGSTNTRDNLVATCERCNKSKSNKPFAVWAAECGIPGVSVAEALKRVDFWIADGFASSKEHRELQKGVKDRLKRKVSDPEIDNRSMESVAWMARELAHRVQYYFDEKHTGTKVRVFRGSLTSAARKASGFESRVNFIGGNGKTRLDRRHHAMDAATVAMLRNSVAKTLVLRGNIRASERAIGAAETWKSFRGENVADRQIFESWSENMRVLVEKFNLALYNDEVSIFSSLRLQLGNGKAHDDTITKLQMHKVGDAWSLTEIDRASTPALWCALTRQPDFTWKDGLPANEDRTIIVNGTHYGPLDKVGIFGKAAASLLVRGGSVDIGSAIHHARIYRIAGKKPTYGMVRVFAPDLLRYRNEDLFNVELPPQSVSMRYAEPKVREAIREGKAEYLGWLVVGDELLLDLSSETSGQIAELQQDFPGTTHWTVAGFFSPSRLRLRPVYLAQEGLGEDVSEGSKSIIAGQGWRPAVNKVFGSAMPEVIRRDGLGRKRRFSYSGLPVSWQG

SEQ ID NO: 94 - protein, 1361 aa, Anaerococcus tetradius
MGNYYLGLDIGTNSVGWAVTDENYNIERFKKKNMWGIRLFDEAKTAESRRIHRQARRMRQRKIQRLNLLMELFDVEISKVDESFFIRKKESDLHYEDKSQDSRYALFNDKEFNDKDYHNKYPTIFHLIMDLIENDEKKDIRLLYLACHYLIKNRGHFIFEGQKFDVNSSLNNNINKLKSHLDQFYNICLDFDNDKLIEILVNQNLNISEKSKKIKELLRKTNLEVGIANLIAGGSIKLSNMFDDDELKNLDYNSLSFKNSNFDEGRELFEEVLEDRFELVEILKDIHDASVLETMLSSASISPDGGKYISSSMINSYNKHKRDLKLLKKIIKKYKKSEYDNIFRDENIKNNYLSYTRTGINKNKKVQAEDNTDSDGFYKYIVKILKDIKENDSDEDIKYILSEIDKKNFVPKQRTKENSVIPYQLREIELRKIIDNQSKYHKFLNEVDEKGISVKEKIISLLTFRIPYYIGPLNPSYNEEKNFTTSWVKRLAKGKVTPWNFEDMVDIDASREAFIENKLNKCSFLLDETVLPKDSLLYQEYMVLNELNNLKINGQSINTDLKKSIYEELFKKYKKVTRKRLISYIKEKENMSGDIVITGIDGDFKQGLKSYIAFKDIIGEKIDDDIYRKEVEKIIRDISLYGDDKSFIQKKIKNENKLDLSDDQISKIAKLKFKDWGRFSKKLLVGIKASDKNTGEIDNIIGFMRNYNYNIMQLMANVFTFKDEIEKLNSKYYTDEKINIDYLDDLYLSSPAKRMLWQSFQIVDEIKNIKNSDPKKIFIEMARSKEDKPTRKMSRKSRLEKLYTDSKKQFIKLFGPDEYDKLNNEIKNKSESDFRWDNLYLYYTQFGRCMYSLDPIDLEELSNKNLYDQDHIYPKSKIYDDSIENRVLVKKQLNLDKSNEYPIPDRVLNKDKNKLLAFWKMLNEKELIGDKKYARLIRKSPFTDEELGDFIARQLVETRQATKETANMLKRLCPDSKIVYVKAKNVSDFRRKFDILKCRSINDLHHAHDAYLNIVVGNVFDTKFTSNPLNFIKNNSKNRSYNLEKIYDYDVIRNEKIAWLAERKEENQDGSIATVLKNLSKNDIRVTRRTYIKCEDLFDENIVRKGNGKFPIKENNNKSDTNKYGGYSGIKNAYFVLLEDEKHNRILEAIPSFIYKKEKNGEKGSVINYLQNILGIKSAKILRDKIKIGSLLKIDKFPYNLAGKSGNGILISGGVQLILDKNTSKYIKKIENYKYKLDENKDYQINIFDKLSKEENIKLFDLFVDKFENSIYKNRVNIKLKEIKLARPKFEHLSIEEQIKTLTQMLILFGRENNAVNLEYIGLPKNTGKTKINKKINNKDIKIINQSITGLYETEEDLANI

SEQ ID NO: 95 - protein, 1377 aa, Lactobacillus brevis
MESNHDGEQVKYTLGLDIGTSSIGYAAIDKHQKPIRAKGKHVIGVRLFQEGQTAADRRAFRTTRRRLKRRKWRLNLLNRLFDPYLSEVDPNFLPRLRQSNLSPKDDNKHFNGSTLFPDKTDAAFYRQYPTMYHLRYALMTEKRKFDIREVYLAIHHIVKYRGNFLNSATVDSFKTSNIDFTSQFDRLNELYRQVILDEPFQINMDQVDEMTNKLLDNDALKLDTQKQVAKLLPVIYNDKPIDKQYTRIATEFSKAILGYKTKLDVILNLDTQNAKDWVIRLDDEDIDDKLPALVENLDESRQEIVTIIRDLYAQITLNAIVPKGKSLSESMVDKYNDHKDHLDLLMGLIHELGDDSAKGIKLREAYTQYVGKSDDKTLNQDDFYAAIKKNLDEDSKRSPKIQRLIEQASFMPKQRTSANGVIPHQLHQLELDRIIENQGRYYPFLKKPNPNTHKPNGGKYKLDELVAFRIPYYVGPLITKRDQEKTSGADFAWMIRKPGQEGEITPWNFDQKVDRMASANRFIRRMTTKDSYLVAEDVLPDASLIYEKFKALNELNMLKVNDSRLSPSQKQDLFNNLFKKQKTIRTKKLQTYIRTNWELPSVMISGLADPDKFNSSLSTYIDFRDIFGEKVDDPNRQADYEEIIEWSTVFEDRKIYQAKLNQLDWLTEPQRKALLTKRYTGWGRLSKKLLTGLKDQNGDSILDQLWKTNDNFMQIQSRDEFAKQIHDENAKQFHEANNVDDILDDAFTSPQNKKAIRQVDKVVQDVVKAVGYAPDKIAIEFTRSLENNPQRTVSRQRQLQAAYKNIPREIMKSGLMAELGSVADSKKVLSDKLYLYFTQMGKDMYEDKTINIDNLPNYDIDHILPQAFIKDDSIDNRVLISKEENARKSNRVPLKFFGAKRMGFWKDLLNNGLISNRKFQNLTTDPEKISKYSAKGFIHRQLVETSQVIRLVANILGNEYSQAGTTIIEVSAKMNRQLREDFHLIKNRNVNDYHHAMDAYLTAYVGDYLYLRYPKLRPYFVYGDFKKAEDQDLNIRNFNFLHDLKDNESLDKIVDSETGEIVWEKHGSVKQLKKVYHYKFMLVSQEVYTRQDALFNQTIYPASDADKRKLIPIKNSKPVDVYGGYSGNIDAYMAIVRVHGKKEDNYKVVGIPMRAVTKLKKAEKEGHDSYLNAVHEVLKPQFTKKKKNRKTGEITETVDEFDVLLGKVYYRQLIVDGNKKFMLGSSSYQYNAKQLVLSDKAMQVLSKNGKVKSQDENQNLIDVYDEILEKVDQYFELYDQRHYRESLHKGRGIFVNLPLSNQYDGSKLTSYGKYETIDAILNGLHANATMSNLRYLGISSPFGKMQASNGLTIDPDSIICYQSPTGLFERQIKLSDL

SEQ ID NO: 96 - protein, 1239 aa, Lactobacillus buchneri
MTEKRKFDIREVYLAIHHIVKYRGNFLNSATVDSFKTSNIDFTSQFDRLNELYRQVILEEPFQINMNQVDKMTNKLLDNDALKLDTQKQVAKLLPVIYNDKPVDKQYTRLATEFSKAILGYKTKLDVILNLDTQNAKDWAIRLDDEDIDDKLPALVENLDESRQEIVTIIRDLYAQITLNAIVPKGKSLSESMVDKYNDHKDHLDLLMGLIHELGDDSAKGIKLREAYTQYVGKSGDKTLNQDDFYAAIKKNLDEDSKRSPKIQRLIEQASFMPKQRTSANGVIPHQLHQLELDRIIENQGRYYPFLKEPNSNTHKPNGGKYKLDELVAFRIPYYVGPLITKQDQEKTSGADFAWMIRKPGQGGEITPWNFDQEVDRMASANTFIRRMTTKDSYLVAEDVLPDSSLIYEKFKVLNELNMLKVNDRRLSISQKQDLFNNLFKKQKTIRTKKLQTYIRTKWELPSVMISGLSDPDKFNSSLATYIDFRDVFGEKVDDPNRQADYEKIIEWSTVFEDRKIYQAKLNQLDWLTESQSKALLTKHYTGWGRLSKKLLTGLKDQNGDSILDQLWKTNDNFMQIQSRDEFAKQIHDENAKQFHEANNVDDILDDAFTSPQNKKAIRQVDKVVQDVVKAVGYAPDKIAIEFTRSPQDRPQRTFSRQRQLQSTYLNVAKALMKSNLNQELKSVIDSQQTLTDKLYLYFTQLGQDMYTGKEINFDELVNYQIDHILPQAFIKDDSLDNRVLVSAPINNAKSDNVPVKKFGAKMGYFWKQLAENHLISKRKLNNLTTDPDKIGKFTAQGFIHRQLVETSQVIRLVANILGNEYGHDGTTIIEVTAKMNHQMRKDFDLIKIRDVNDYHHAMDAYLTAYVGDYLYLRYPKLRSYFVYGDFKKLKDQSLKIRNFNFLHDLTNDEAGDKIVDQETGEIIWDKHESVKQLKKVYHYKFMLVSQEVYTRQDALFNQTIYPASDADKRKLIPIKNNKPVDVYGGYSGNVDAYMAIVRIHGKKEDKYKVVGVPMRAVADLKKAESKGRDNYLNAVHEVLKPQFTKKKKDRKTGEITEMMDDFDVLLGKVYYRQLIVDGNKKFMLGSSTYQYNAKQLVLSDKAMQVLSKDDKLKNQDENQNLIDVYDEILEKVDQYFELYDINKFRQKLHDGRKKFIELPVDNDFNGKKLISYGKRATIISILNGLHANATMSNLKYLGISSPFGMLQVPNGIILSPASRICYQSPTGLFERKVKLSDL

SEQ ID NO: 97 - protein, 1381 aa, Lactobacillus fermentum
MDYVKEYHIGLDIGTSSIGWAVTDSQFKLMRIKGKTAIGVRLFEEGKTAAERRTFRTTRRRLKRRKWRLHYLDKIFAPHLQEVDENFLRRLKQSNIHPEDPAKNQAFIGKLLFPDLLKKNERGYPTLIKMRDELPVEQRAHYPVTNIYKLREAMINEDRQFDLREVYLAVHHIVKYRGHFLNNASVDKFKVGRIDFDKSFNVLNEAYEELQNGEGSFTIEPSKVEKIGQLLLDTKMRKLDRQKAVAKLLEVKVADKEETKRNKQIATAMSKLVLGYKADFATVAMANGNEWKIDLSSETSEDEIEKFREELSDAQNDILTEITSLFSQIMLNAIVPNGMSISESMMDRYWTHERQLAEVKEYLATQPASARKEFDQVYNKYIGQVPKEKGFDLEKGLKKILSKKENWKEIDELLKAGDFLPKQRTSANGVIPHQMHQQELDRIIEKQAKYYPWLATENPATGERDRHQAKYELDQLVSFRIPYYVGPLVTPEVQKATSGAKFAWAKRKEDGEITPWNLWDKIDRAESAEAFIKRMTVKDTYLLNEDVLPANSLLYQKYNVLNELNNVRVNGRRLSVGIKQDIYTELFKKKKTVKAGDVASLVMAKTRGVNKPSVEGLSDPKKFNSNLATYLDLKSIMGDKVDDNRYQMDLENIIEWRSVFEDGEIFADKLTEVEWLTDEQRSALVKKRYKGWGRLSKKLLTGIVDENGQRIIDLMWNTDQNFMQIVNQPVFKEQIDQLNQKAITNDGMTLRERVESVLDDAYTSPQNKKAIWQVVRVVEDIVKAVGNAPKSISIEFARNEGNKGEITRSRRTQLQKLFEDQAHELVKDTSLTEELEKAPDLSDRYYFYFTQGGKDMYTGDPINFDEISTKYDIDHILPQSFVKDDSLDNRVLVSRAENNKKSDRVPAKLYAAKMKPYWNQLLKQGLITQRKFENLTMDVDQNIKYRSLGFVKRQLVETRQVIKLTANILGSMYQEAGTDIIETRAGLTKQLREEFDLPKVREVNDYHHAVDAYLTTFAGQYLNRRYPKLRSFFVYGEYMKFKHGSDLKLRNFNFFHELMEGDKSQGKVVDQQTGELITTRDEVAKSFDRLLNMKYMLVSKEVHDRSDQLYGATIVTAKESGKLTSPIEIKKNRPVDLYGAYTNGTSAFMTIIKFTGNKPKYKVIGVPTTSAVGLKRVGKPGSESYNQELHRIIKSNPKVKKDFEIVVPHVSYSQLIVDGDCKFTLASDTYQHPATQLVLSKESMEIIADDFKFVKENPATADEQLVRVFDEIVNQMNHYFTIFDQRSNRQKVTKARDKFVSLPTESEYEGAKKTQVGKTEVITNLLMGLHANAAQGDLKVLGLSTFGFFQSSGGLNLSEDAMIVYQSPTGLFERRICLKDI

SEQ ID NO: 98 - protein, 1306 aa, Sphingobacterium spiritivorum
MKHILGLDLGTNSIGWALIKQNFENKQGEILGMGSRIIPMGAELSKFEQGQAQTKNANRRIARGTRKLNKRYKQRRNKLIYILQGLGMLPDQIKLVNQFSDPNKLDKISILPISKNQQQLTAFDLLELRVKALTEKIELEELGKVIYKYNQLRGYSGGNSEPEKEENNEDESEENEKTNDSFVVFSKVLSLGLPEEITFKGKKLSKRKIAIETEDGIIEAETFLDSLKENDSLELHVNIRRAKSGDTITIKLPSKTSWRKKMENIEKQLADKSKELGREYFISELLFDILKENKWAKIRNNVILRSRYESEFDAVWSEQSKYYPILNHLETDRLQKILEFIFPGQKESQEKLRQTGLKEGLKYVIKNQVVFYQRELKDQSDLISNCRYEPTEKVVAKSHPVFQEYKIWEQINKLVINTKIENGVNRKGEIRYKYIDKPIPVALKEWLYEELQSKKEVSFNPILTKLKKEFKLRENVDFLNGMNAKDKLKGNETKVILQKALGELWNIFGLDDSERQVELWEILYNGKGNEYDLTSERTSNILAFIEKYSPDLENKNDVAIKISKIKFSRNYSNLSLKAIDNILPLVRAGKFFDQNFSEALSHKIVKLLNENVEDPFEKSAQEFLDKNQDVLSDGGIVNAIATILVYDKHTAKEYSGDELIKEFTQISRLKQGELRNPLAEQIINEALVIVRDIWRKYGFKPDEIRVELARELKNNAVERGKMYSANLKSQKHNAEIRNKLIELKQEISIANIEKYKLWVSQENLQEVYLKNYNDPSKSEIEKLKLWESQGHISPYTGQPISLSELFNRERYDVDHIIPQSRYFDDSLSNKVICEKSINNEKGNRTSMEYFEVGSVNYRIFTKDQFIDHANKYFSGKKRKNLLATSIPEDPIQRQIKDTQYISIRIREELNKIVGNENVKTTTGGITDYLRNHWGLTDKFKVLLKERYEAVLPKIAQLEYDNYKKETEKKFTEYKNADVEFNEPILDEEIFIEKFRSEFIRKKNNKLIIKGWSKRIDHRHHAMDALVIACTQPAHIKRLNDLNQVLKEWLDKNKEKFFPGFSGTKTELLDEVLNLEEEKRREIFNQLEKFRAIEMPWKGFPEEAEQKLKEVIVSHKPKDKLLLQYDIQGNKQIKLRGQLHEGTLYGLSNGKEIYRIPINKLAGKQFATEKTIEKIVNPFLKNVIEEHLKSFGKKEEAFSAEGILDLNKKLAERKDEQQNPKPHPPISTIKIYYKDPSKSKKKKTDDEDDISLQKLNRKKSFNDSLYVKTGDNYLFAVMEKEVFNKKLNKDKTERHYDLKLFLTLLIF

SEQ ID NO: 99 - protein, 1358 aa, Acidaminococcus sp.
MGKMYYLGLDIGTNSVGYAVTDPSYHLLKFKGEPMWGAHVFAAGNQSAERRSFRTSRRRLDRRQQRVKLVQEIFAPVISPIDPRFFIRLHESALWRDDVAETDKHIFFNDPTYTDKEYYSDYPTIHHLIVDLMESSEKHDPRLVYLAVAWLVAHRGHFLNEVDKDNIGDVLSFDAFYPEFLAFLSDNGVSPWVCESKALQATLLSRNSVNDKYKALKSLIFGSQKPEDNFDANISEDGLIQLLAGKKVKVNKLFPQESNDASFTLNDKEDAIEEILGTLTPDECEWIAHIRRLFDWAIMKHALKDGRTISESKVKLYEQHHHDLTQLKYFVKTYLAKEYDDIFRNVDSETTKNYVAYSYHVKEVKGTLPKNKATQEEFCKYVLGKVKNIECSEADKVDFDEMIQRLTDNSFMPKQVSGENRVIPYQLYYYELKTILNKAASYLPFLTQCGKDAISNQDKLLSIMTFRIPYFVGPLRKDNSEHAWLERKAGKIYPWNFNDKVDLDKSEEAFIRRMTNTCTYYPGEDVLPLDSLIYEKFMILNEINNIRIDGYPISVDVKQQVFGLFEKKRRVTVKDIQNLLLSLGALDKHGKLTGIDTTIHSNYNTYHHFKSLMERGVLTRDDVERIVERMTYSDDTKRVRLWLNNNYGTLTADDVKHISRLRKHDFGRLSKMFLTGLKGVHKETGERASILDFMWNTNDNLMQLLSECYTFSDEITKLQEAYYAKAQLSLNDFLDSMYISNAVKRPIYRTLAVVNDIRKACGTAPKRIFIEMARDGESKKKRSVTRREQIKNLYRSIRKDFQQEVDFLEKILENKSDGQLQSDALYLYFAQLGRDMYTGDPIKLEHIKDQSFYNIDHIYPQSMVKDDSLDNKVLVQSEINGEKSSRYPLDAAIRNKMKPLWDAYYNHGLISLKKYQRLTRSTPFTDDEKWDFINRQLVETRQSTKALAILLKRKFPDTEIVYSKAGLSSDFRHEFGLVKSRNINDLHHAKDAFLAIVTGNVYHERFNRRWFMVNQPYSVKTKTLFTHSIKNGNFVAWNGEEDLGRIVKMLKQNKNTIHFTRFSFDRKEGLFDIQPLKASTGLVPRKAGLDVVKYGGYDKSTAAYYLLVRFTLEDKKTQHKLMMIPVEGLYKARIDHDKEFLTDYAQTTISEILQKDKQKVINIMFPMGTRHIKLNSMISIDGFYLSIGGKSSKGKSVLCHAMVPLIVPHKIECYIKAMESFARKFKENNKLRIVEKFDKITVEDNLNLYELFLQKLQHNPYNKFFSTQFDVLTNGRSTFTKLSPEEQVQTLLNILSIFKTCRSSGCDLKSINGSAQAARIMISADLTGLSKKYSDIRLVEQSASGLFVSKSQNLLEYL

SEQ ID NO: 100 - protein, 653 aa, Oribacterium sinus
MELINSEEFTFKEELEKHTQVAMKQLSEFTYEDLEDSYFSVPVKRMIWQTLLVVREIEKVMGYAPKRIFVEMTRTEEEKGDKGRKESRGNQLLELYKSIKNTDSHNWKEEIAAADKDGKLRSKKLFLYYMQMGRDMYTGEEIDLGRLYDDNLYDIDHIYPRHYVKDDSIMNNLVLVNRRANQDIKKDLYPIPEQIKANPNVHMLWDALHKQKLITDEKYARLTSNTAFSEKQLGDFIARQLVETGQGTKGVADLLEQLFKDTVIVYAKASNVSDFRRDNGFLKSRLVNDFHHAQDAYLNIVVGNVYYTKFTKNPWNFICKDYEKDKEKNRYNLARMFDWNVVRGSETAWIVERKDEKGTISTVRKMMQKNTPLLTRMNFEQHGSIANATLYSAKKAKSENYLPLKTADEKMSDVKKYGGYTSMSIAYYFIVHHKEDKKENVTIEALPLYCKDKVEREENGLEKYCEEVLGYGEVNIIRRKLKIQSLLEFNGYQVHLSGKTGNQLILRNAISLCLSTKWITYIKKLEKAVNIQIVEEVVTPEENIKLYNLLADKHANTVYSKRPNAYGEKLLADREIFVTLEFGKQCEALLQILSLTKIGSTEANLLLIGESEHSGKILISKNLKASDRPAVINQSPCGLYEKKEWIFDKIVEK

SEQ ID NO: 101 - protein, 1436 aa, Capnocytophaga gingivalis
MKYIKYILGLDIGSNSIGWALIQLDLLQKTKRIIAAGSRIIPMDQKVLSDFGKGITISPTAQRTSYRNARHCRERHLLRRERLHRVLHILGFLPTHYDKQIDFSKRYGKFVDNTEPKIAYNEGKFLFMDSFQEMLSDFKSHQPDLFYTKKNGEESKIPYDWTIYYLRKKALSQKISKEELAWIILNFNQKRGYYQLREEEGNKENDFEIISSKIISVIKKDKDKKYNKYWYDIILENGLVYQAAFYNDFVYNWINQDREFIIERTSLKNGAEKVKLSYLPTFDEIDKMDKKEQDKYYKKIKIKTENSIGNKTVGCYIYDHILQNPNEKIKGKLVRTIERKYYKEELKAILEKQIALQPELFTDQLLADCIRELYSKNEAQQRNLAARDFVHLLVEDIIFYQRPLRRQKSTLANCSLESRSYIDKDSHTRKEAPLKVCPKSNPYYQEFRVLQWLQNLKIYEIDSDQEVTHQFIKTLEDKQQLFEFLMAQKEIDCEELLKYFLNQTYPNAKEKALKSELKKWKDTYRWNYVYDIGEKSSKKYPMNETRYELKRHLEKVANLPDDFLSSEVEYLLWHLIYSVKDKVAYEKGLKKFAQKHHLDKDSFVESFKKFNPYPSEYGSFSEKAIRKLLPLMRFGAHWDFNHIDKNTQKRIEDLITGVENEEIRTILREKAEKYQLEKETDFQDLPLWLAQYIVYNRHAEASSLEKWTSVNDLETYLNEFKQHSLRNPIVEQVVMETLRVVRDIWQQYGQGQASFFNEIHIELGRELKKTAKEREKLSKQNQKNEDINLSIKEKLKELEKYNTRAYSITHQEKYKLWLEQKHISPYTGQIISPENLFTDNYEIEHIIPQSRFFDDSLSNKVVCESIVNKAPYKDRQLGLEFIKNQGGRIVKELSKENKTIKIFTEEQYRTFIKEHYSNNPEKTKKLLLEEIPEKMVARQMNDTCYISKFISEILSKIVRSDEQDEGVHSKNVILCTGKITSILRQDWGLNDIWDNLILPRFERMNNLLQKEKFTIYSIEKQKKIPVVPINDQFKSFQKKRIDHRHHAMDAIIIACTTREHINYINNQHALEKEKDKKEKQEERDKLREKLCIKKYNNRSEGNYSWIFKKPWDTFTQEVRVALEDIVVSFKQNLRVINKATNYYERWVEENGKYIKKMVKQEGTNWAIRKPLHEETISGKIYLDREKITKNDILTATRKTVDSSFDDKRIKKITDTGIQKILLNYLKYKGSPEIAFSPEGLEELNKNLSIYNDGKPHKPIYKVRIYEKGSGRFALGEKGRKYKKYVQGASNLYFGIYQGAKRSFATIPLNEVIERQKQGLPSVPEYNEKGDLLLFSLSPNDLVYVPIEGEIIENIDFRNLSKEQKERIYNVNDFSSTCYFTPNRIAKAIFPKEVDLQRKGDKLSGSYDTKTASLEGIQIKEVCIKLKVDRLGNISKA

SEQ ID NO: 102 - protein, 1069 aa, Bacillus cereus
MNYDIGLRIGITSCGWSIINKDLERIEDLGVRVFEKAENPDGTASAAPRREARKSRRKHRRKKHRIERIKRLIVQHDLLSKKELDSLYLSPFNIDVWNLQVEALERKLDNREFARVLIHLVQRRGFQTIRKSVEIQEEGKLLENVSENERIMKVNGYKTVGEMFSKHEKFTHHKRNKDGSYTSVVTRSLLLKEIKTIFNSQRILGNVFSTQKLESDYLYIWGSQRPTLTYEQLMSMVGNCIYEKKEKRAPKTSWAFQYFSLLQKINKLKVSDDNTLRKLSKEERDIVIELAFKKKNVSFVDIRKALKLNDNTKFNHLTYSHVVETKKVEKATFIELKGYHLIKKQLKDRNVELTQELQPKDYDAIAAASTFFKNDIEFRDYLRNQYLDSNGKRKSNIANKVFEDKVIAAVFELNFSKVCHLSFKSLYKLIPHLEKGLDYKEAILCAGYNFRDENKRDKKLFLPVIQQETNPVVHRALTQARKVINAIIREYGSPNTIRFVVANDLAKTYKQRKELESTLKKNRAENEKIKTKLLSMGIINPTGMDIVKYKLWYEQSGICLYTGRQMELSSLFKPGYSIVNHIIPYNRSFDDTYHNRVLTLTETKYEKGNKIPFEYFGAEETCWNEYEKRVSTSKKIHDKKREKLLIRNFDIEYENEMISNNVFDTHYIGSYFEKYIDEHLQFKKSTKKQKVFSIHGNMVAHLHSRWGFNKNSREIYLNHAVDAAIVAVLTDQLIRNIADYYRRDNILEQKGSLKFPEPWKSFSIELEARISPQVRDLIKKLNLDSYLDVDILHIKPVFISKKPRRKVNGEAHKSTIRSLIGINEIGKTVTCIKTRLEDIPFDENGDFPMYGKDTDKYTYTAIKERYLEFNKDKEKAFSTPLYKLKRNGEPGNQIKSVKIIDTRNIVNKVNQGKGIAYNSNIIRVDVFSRDQKYYVVPIYLRDFIKGSLPNKIITAAKGFMQWPETDNSYTFLFSIFPNDLIKVVPKEGKFIKAKNENKENINLTEILGYFKGLDSSTGAFTLESHDGSLLARGIGTKNLLLIEKYQVDVLGRYNKVGNEERQDIKIQQN

SEQ ID NO: 103 - protein, 1391 aa, Lactobacillus jensenii
MKEIKDYIIGLDIGTNSCGYVVTDKQNNILKLKGKTAIGARLFKEGEAAADRRAFRTTRRRLARRRWRLSLLEEIFDEEMNKVDPSFFRRLKESDYSPKDRRKQFNSIVFESSEADKAFYEKYPTIYHLRNALMHDNQKHDLREIFLAVHHIVKYRGNFLREDSVKAFKAAKFTLQGEDGIGPVDKLNDLLKEIYIEAAPELATDNLSKIEDIIKDKKLYKQDKLKQIANLLPKAVDSKDKAKLNKDIAKQVANALMGYMFRLDTLFSFTDVDVKDYKLKFSDANIDESLDALTSLLTDAQIEFVLELQSIYNTIVLNEIVPDGMSLSESMVKKYDDHKKDLKLYKEYIDSLSDQKKAKQLEAAYALYVNYRKADLLAAKKLFEKKKIGDKKFVDVISNFEVFGKFVSDNLDDSELANKIKARLDLGEFLPKQRTNQNGVIPYQLHQVELTQILEKQGKYYPFLITPNPVESHRNNAPYEISELVSFRVPYYVGPLIDNQSIKDKQNKNKFAWMVRQKQGQITPWNFEEMVDTTESANQFIKRMTRKDTYLLAEDVLPKSSLIYQKFMILDELNRIKIDGKKLTSKLKHDIFEKLFKKQKSINLDNLKNYLLAEGNIPGLIEGLSDGINFNNSFSTYIDYRNIFGDEIDNPNKQADFEKMIEWSTVFEDRKIFKRKLKEITWLTPEQIKQVSSKRYSGWGRLSKKLLTQITDENGVNILQRLWNEPETLTEVLANPVIKRKISEANSLFVQINKVENILDDAYTSPQNKKAIRQVIRVVDDIIAAAHGKKPSQIAIEFARSSQNKAKVPDTRKKQLDKIYNKISSEILDSSIKNELKNLKSNKYLSKDKLFLYFKQMGRDAYTGDKLSLDQLQNYDIDHIFPRSFIKDDSLDNRVLTQKPINAKKSDYGIPALEFGNKYVPDLGITVKEMWKLWQENGLISKSKLINLCTNPKKIGSKRASGFINRQLVETSQVIKLVAIILQAEFPDTEIIEVKALQNTTLRESFHLYKNRSVNDYHHAIDAYLTTIVGNYLYQVYPKLRPYFVYGQFKKFNQEKNIDILKRLKNFNFLRQLIFNTDDNIYISGTKEIVFNKKDIIHKLETAYGYKYMNISRECYQETSSLFNQTLYAHNSSVKNSLIPKKKGLPTEIYGGYSGNKDSFFVLVKIVKKRTNLYRIVGIPTRELAKLNSSNNYNQALNKIVESKLCLKETESFKILIKRLLYGTLIVDNGQKFRIGSFKEKHNVQQLVLQLKSMKYIKFYIDGGQNYFTDVERKKLEKQDRDKCLLYVFDDIMNVVNKRFTLFDMSKYEKDGDSLREKFNCLDFNDKVSILSDLLKAFHANSDRTSITKLKITNLGRHQAGKNGITLTTNAQIIYQSPTGLFERRIKIKDL

SEQ ID NO: 104 - protein, 1114 aa, Eubacterium rectale
MNYTEKEKLFMKYILALDIGIASVGWAILDKESETVIEAGSNIFPEASAADNQLRRDMRGAKRNNRRLKTRINDFIKLWENNNLSIPQFKSTEIVGLKVRAITEEITLDELYLILYSYLKHRGISYLEDALDDTVSGSSAYANGLKLNAKELETHYPCEIQQERLNTIGKYRGQSQIINENGEVLDLSNVFTIGAYRKEIQRVFEIQKKYHPELTDEFCDGYMLIFNRKRKYYEGPGNEKSRTDYGRFTTKLDANGNYITEDNIFEKLIGKCSVYPDELRAAAASYTAQEYNVLNDLNNLTINGRKLEENEKHEIVERIKSSNTINMRKIISDCMGENIDDFAGARIDKSGKEIFHKFEVYNKMRKALLEIGIDISNYSREELDEIGYIMTINTDKEAMMEAFQKSWIDLSDDVKQCLINMRKTNGALFNKWQSFSLKIMNELIPEMYAQPKEQMTLLTEMGVTKGTQEEFAGLKYIPVDVVSEDIFNPVVRRSVRISFKILNAVLKKYKALDTIVIEMPRDRNSEEQKKRINDSQKLNEKEMEYIEKKLAVTYGIKLSPSDFSSQKQLSLKLKLWNEQDGICLYSGKTIDPNDIINNPQLFEIDHIIPRSISFDDARSNKVLVYRSENQKKGNQTPYYYLTHSHSEWSFEQYKATVMNLSKKKEYAISRKKIQNLLYSEDITKMDVLKGFINRNINDTSYASRLVLNTIQNFFMANEADTKVKVIKGSYTHQMRCNLKLDKNRDESYSHHAVDAMLIGYSELGYEAYHKLQGEFIDFETGEILRKDMWDENMSDEVYADYLYGKKWANIRNEVVKAEKNVKYWHYVMRKSNRGLCNQTIRGTREYDGKQYKINKLDIRTKEGIKVFAKLAFSKKDSDRERLLVYLNDRRTFDDLCKIYEDYSDAANPFVQYEKETGDIIRKYSKKHNGPRIDKLKYKDGEVGACIDISHKYGFEKGSKKVILESLVPYRMDVYYKEENHSYYLVGVKQSDIKFEKGRNVIDEEAYARILVNEKMIQPGQSRADLENLGFKFKLSFYKNDIIEYEKDGKIYTERLVSRTMPKQRNYIETKPIDKAKFEKQNLVGLGKTKFIKKYRYDILGNKYSCSEEKFTSFC

SEQ ID NO: 105 - protein, 1362 aa, Lactobacillus paracasei
MTKLGKPYGIGVDIGSNSIGFAAVDENSHLIRLKGKTVIGARLFEEGKAAAKRRAGRTTRRRLSRNRWRLSFLRDFFESHITPTDPNFFMRQKYSEISPKDKARYKYEKRLFNDRTDAEFYQQYSTMYHLRNRLMTDPSRADVREIYFAIHHILKSRGHFLTPGDAKDFNTNDVALDEIFPALQDAYAQVYPDLGITFDEDKANEFKTILLNEIATSIDTQRALVKLLLAEEDDKDILKQQKQVLTEFAKAVVGLKTKLNLALGTEVDSSEATAWNFSLGQLDDKWAGIESAMTDEGTEILDQIRDLYRARLLNGIVPTGKTLSQAKVDDYTQHHEDLQLFKAYLKQLEDDGTAKAIRQLYDRYIDGDDAAPFLRENFVKALTKDVTAHPNTKSPELLERLAQPDFMLKQRNKANGAIPVQMQQRELDQIIKNQAVYYDWLAAPNPVEKHRKSMPYQLDELLNFRIPYYVGPLVTAKEQKAAQGGVFAWMVRKDPEGNITPYNFDEKVDREASANTFIQRMKTTDTYLIGEDVLPKQSLLYQRYEVLNELNNVRVNNEKLSIEQKQQVIRELFERHNSVTIKQFAENLRAHGDYAHIPEIRGLADEKRFLSSLSTYRQLKSLLPEAIDDPAKQADIENIIAWSTVFEDAAIFKTKLKEISWLGSEAITKLSNIRYRGWGQFSRKFLNGLTLGNGHTIIQELLLSTNNLMQILTDETLQKKMTELNADKLKTANINDAIDNAYTSPSNKKALRQVLRVVDDIKRAADGQDPSWLYVETADGGGTPGKRTRARQHQLQEIYANAAHELIDTAVRGELEDKISDKADFNDRLVLYFMQGGRDIYTGAPLNIDQLSSYDIDHILPQSLIKDNSLDNRVLVHAIINREKNATFASTIYAQKMNATWRQWHEAGLISGRKLRNLQMRPDQIDKYASGFVARQLVETRQIIKLTEQIVAAQYPDTKIIAVKAGLSHQLREELEFPKNRDVNHYHHAFDAFLAARIGTYLLKRFPNLQAFFTYGKFTKADVKKLRGFNFIRDITHAEDKIVAKDTGEVVWDKQRDVDELDRIYNFKRMLITHEVRFETADLFKQTVYGARDSKEAGGSKQLIPKKKGYPVDIYGGYFRENTAYLAVVKVTKKTETIFKVVKIATSQVAALNKARSRSTAEELSVLTELLKPKFSKVGKNGKITDTPFEVVLPRVPREQLFYNAKYGFFMVNSDTMFHNFQEIWVSRSDQKILQQIRKAKIDYPNVDQDLDNLFHNLADQIVKYFDLYSIAGFKEKISQSQNTFNDLAVDDTDQSVGKITVINELLKGAQANGMTGSLKVLKISTPFGFTQDKSGVLTKDSSIIYQSPTGLFERSVRLTDL

SEQ ID NO: 106 - protein, 1056 aa, Actinobacillus minor
MKALNYILGLDLGIASVGWAVVEIDQNELPIRLIDLGVRTFERAEVPKTGDSLALARRLARSSRRLVRRRAVRLLKAKRLLKQEGILQADDFHSSHLKPLPNNPWELRVKGLNHLLDRKEWAAVLLHLLKHRGYLSQRKNESKTDNKELGALLKGVSENRQLLQAQAFSTPAEIAIKKFQQEEGHIRNQRGAYSHTFDRNDLLAELRLLFQKQREFNNPYTSQSLEQAIAELLMWQKPALSGEAILKMLGKCTFEPSEYKAPKNSYSAEYFVWLTKLNNLRILENGADRGLTAEERQLLINQPFEKAKFTYAQARKLLELSDLAIFKGVRYGKDNAESATLMEMKAWHAIRKALESNGLKTEWNGLKTKPELLDKIGTAFSIYKTDEDISQYLNGELSPAVLNALLENLSFDKFIRLSLQSLAKILPLMEQGLRYDEACKQVYGDHYGKKEQLELRFLPKIPVEDIRNPVVLRTLSQARKVINGVVRLYGSPARIHIETGREVGKSFSERRDISKRQEENRNERQRAVEKFKEFFPHFVGEPKAKDILKMRLYEQQHGKCLYSGKELDLNRLLEKGYVEIDHALPFSRTWDDSFNNKVLVLASENQNKGNQTPYEWLNGKENAERWKLFQALVNGSRFPYSKKQRILTKYLDEDGFRERNLNDTRYVARFLCNFIEDNMQLVGQGKKRVFASNGQITALLRRSWGIQKVREDNDRHHAVDAVVVACSTRALQKKITDYVRYKEMNVFTGEKIDQETGEIIKFHFPEPWKFFRQEVEIRVFSETPAEDVVIALPDRPQANHEFIQPLFVSRAPTRKMTGQGHMETIKSAKRLAEGLSVSRVPLTQLKLKDLENMVNREREKALYEALKVRLEKFNNDPAKAFADPFYKKGGQQVKAVRVEQVQKSGVLVRQENGVADNASMVRVDVFIKGGKYFLVPIYTWQVAKGILPNRAATQGKEEEYWDIMDETAIFQFSLYQNDLIKLVTKKKTIFGYFNGLNRATSNINIKEHDLDKSKGKDGIYLEVGVKLALSLEKYQVDELGKNIQPCRSMKKRPPVR

SEQ ID NO: 107 - protein, 1081 aa, Neisseria flavescens
MTAFKPNPINYILGLDIGIASVGWAMVEIDEEENPIRLIDLGVRVFERAEVPKTGDSLAAARRLARSVRRLTRRRAHRLLRARRLLKREGVLQAADFDENGLIKSLPNTPWQLRAAALDRKLTPLEWSAVLLHLIKHRGYLSQRKNEGETADKELGALLKGVADNAHALQTGDFRTPAELAVNKFEKESGHIRNQRGDYSHTFSRKDLQAELVLLFEKQKEFGNPHISDGLKEGIETLLMAQRPALSGDAVQKMLGYCTFEPTEPKAAKNTYTAERFIWLTKLNNLRILEQGSERPLTDTERATLIDMPYKNKLTYAKARELLGLDDTAFFKGLRYGKDNAESATLMEMKAYHAIRRALEKEGLKDKKSPLSLSPELQDEIGTAFSLFKTDEDITGRLKGCLQPEILDALLKHINFDKFVQISLKALRRIVPLMEQGKRYDEACAETYGDHYGEKNSEEMLYLPPIPADEIRNPVVLRALSQARKVINGVVRRYGSPARIHIETAREVGKSFKDRKEIEKRQEENRKDREKAAAKFREYFPNFVGEPKSKDILKLRLYEQQHGKCLYSGKAIDIRRLNGKGYVEIDHALPFSRTWDDSFNNKVLVLGSENQNKGNRTPYEYLNGKDNSREWLEFKARVETSRFPHSKKQRVLLQKFDEKGFKERNLNDTRYVNRFLCQFVADHMQLTGKGKRRVFASNGQITNLLRGFWGLHKVRAENDRHHALDAVVVACSTVAMQQKITCFVRYKEMNAFDGKTVDKETGEVLHQKTHFPQPWEFFAQEVMIRVFGKPDGKPEFEEADTPEKLRALLAEKLSSRPEAVHEYVTPLFVSRAPNRKMSGAHKDTLRSAKRFVKHNEKISVKRVWLTEIKLADLENMVNYKNGREIELYEALKARLGAYGGNAKQAFDPKDNPFYKKGGQLVKAVRVEKTQESGVLLNKKNAYTIADNGDMVRVDVFCKVDKKGKNQYFIVPIYAWQVAENILPDIDCKGYRIDDSYTFCFSLHKYDLIAFQKDEKSKVEFAYYINCDSSNGRFYLAWHDKGSKEQQFRISTQNLVLMQKYQIDELGKEIRPCRLKKRPPVR

SEQ ID NO: 108 - protein, 1392 aa, Gemella haemolysans
MANKTWYLGLDIGSASVGWAATDTGYKIIRKNKKRLWGVRLFEEAKTAEDRRGYRSSRRRLARRKWRLNLLEELFTSEVKKVDENFFLRLKESQYHYEDKTHKVPYAIFNDKDYTDKDYYKDYPTIYHLRSKLMTEENPDIRKVFLAIHHIIKNRGHFLLQGQSFKDGNLNNLIKELLELDILHVGFEVTEEVVDKIADISLEKKTSKDKLNDIKELYPKEKQLLEVFRLIFGGKTSLDKLFAIDEYKELDAAIKSVSFKEKIYEEVRHDYEQVLSNYIELLDLAKLVYDSIILSDIKKEGKTLSESKVELFEKHRDDLLKLKNLVKNDSKLSEDKKVELYALIFKEDKDKGTNYVNYIRKSEEGKGCNYEDFKKFLVKELAKLEESSVKTEIIKDLELEQFLPLQRTKDNSVVPYQIHKEELVKILDNAARYHSFLNEKDESGYNVREKVIQLLEFRIPYYVGPLNSSKKAKEGGFAWSVRNTGYENTPVTPWNYSKVIDESASAEKFITNLTNKCTYLKGEDVLPKSSLLYSEFALLNELNALKYDGNRISLEARNTIIEKLFKQQGKKVTKTSIKNLLKAEGYIDGKGEITGIDITVKNDLKSYRDFKKILGNKFNSEHVENIILWITLYGESRKLIKAKIESVYGEVYSKDEITKMSRLVYKDWGRFSRKLLTELVSKKLYNEETGECLNIIGAMRQNNILFMELLADRFDYSKQIVEFNKELQEDVTEIAPEILDDLYVSPAVKRSIWQTVRIVEELKKIIGCAPAKIFVETTRSNQEKKKPTDSRKKQLELAYKAVKKDVKELEKEIGTINFDVLNDRLSSVEPSKLKAKKLYLYYTQLGRCMYSEEPINISELFDNNKYDIDHIYPQSKIKDDSFTNTVLVKRESNAAKTDRYPLGSDIQTPSNRRFWKFLKEKGLISDEKYNRLVRTEEFSDEELSGFIARQLVETSQSVKAVASILGELNPETSICYSKAENVSSFRQNFGKIKKGDRDSKNNDQLIKVREINDYHHAKDAYLNVVVGNVYDTKFTRNVFNFIKDKKDGRKYSLNKVFYENVSDSKTVAWEMDKTIHQVEKVMNNNNIMVTRRTSEQKGGLFDATVYKAKVAAKAKDGVYYPLKTSNSVVKDVAKYGGYTSIGIAYYSIFEYTIVNKKGEEKITRIIPIPIYISQNIKDSTALIEFGKSQIFCRAYEKIKDFKLLYRKLCIGSKININNYQYYIGGKSDERFYYDSAIQVTLDKKSEKYLKILSKYQNWKKENKDGELWENITKENNIELYNKLVEKMNSEIFTKKKSNKYNELNSEEIRNNFIKISVEEQAKVLLEILNLLTNKKSIFDLKSIDIKAARGKISFNLTSLIQFSIIEQSITGFYEKEITIIGDKGNDMENNNS

SEQ ID NO: 109 - protein, 702 aa, Helicobacter pullorum
MRKILKIDERIQFKEVDYTAKNPENKKFVEFKNLKKFCEILGAIVGDRALADSIARDMTLIKDEEELAQKLRGYGKFSQEQITQLSALHFSHHISLSLKALSEILPFMREGMRYDEACQEAKLQAKHNDKKSKFLPPFCESIYADELTNPVVHRAIAEYRKILNALIAKYGSVHKIHIELTRDVGKNFQEREKYKKEIESNYKARVQAMQECEKLGLTLSEGNILKLRLFREQNEICVYSGRKITLANLKEQGALEIDHILPYSRSSDDSYMNKVLVFTNENQNKGNKTPYEAFGGDSQKWGEIESLALRSGYPKKKAKRILDKGFGDREAGFKSRNIVDSGYIARLIANYTKEYLKFLPLDSHENTALIAGEKDSKIHVEAVKGMLTATMRHFWGLGSKNRYEHTHHAVDAIIIAYINAAMIQRFSQFRQNQESLKARFYAKELAKEEFKTQRAFFEPFSGFREQVLAKVGQIFVSRPPRKRARGALHEETFYSIDDKKLSETYGGKKGVQRALSLGKIRQIGTKIVANGPMVRVDIFKHTQSGRFYAVPIYTMDFALGILPNKAVVSGKDKDRIIKDWLEMDSCYEFCFSLFKDDVIEVQKRDMEKPELAYFVSLDASDGRIKVRHHCNDITKINENQKKLFSEAIEKEVVGRGSIQNLKVFKKYKVSPLGEIKEAKYEPRQPIALKTSPKKHRKQNNAQ

SEQ ID NO: 110 - protein, 1371 aa, Streptococcus dysgalactiae
MDKKYSIGLDIGTNSVGWAVITDDYKVPSKKFKVLGNTDRHSIKKNLIGALLFDSGETAEATRLKRTARRRYTRRKNRIRYLQEIFSSEMSKVDDSFFHRLEESFLVEEDKKHERHPIFGNIVDEVAYHEKYPTIYHLRKKLADSTDKADLRLIYLALAHMIKFRGHFLIEGDLNPDNSDMDKLFIQLVQTYNQLFEENPINASRVDAKAILSARLSKSRRLENLIAQLPGEKRNGLFGNLIALSLGLTPNFKSNFDLAEDAKLQLSKDTYDDDLDNLLAQIGDQYADLFLAAKNLSDAILLSDILRVNSEITKAPLSASMIKRYDEHHQDLTLLKALVRQQLPEKYKEIFFDQSKNGYAGYIDGGASQEEFYKFIKPILEKMDGTEELLAKLNREDLLRKQRTFDNGSIPHQIHLGELHAILRRQEDFYPFLKDNREKIEKILTFRIPYYVGPLARGNSRFAWMTRKSEETITPWNFEEVVDKGASAQSFIERMTNFDKNLPNEKVLPKHSLLYEYFTVYNELTKVKYVTEGMRKPEFLSGKQKEAIVDLLFKTNRKVTVKQLKEDYFKKIECFDSVEISGVEDRFNASLGTYHDLLKIIKDKDFLDNEENEDILEDIVLTLTLFEDKEMIEERLKKYANLFDDKVMKQLKRRHYTGWGRLSRKLINGIRDKQSGKTILDFLKSDGFANRNFMQLINDDSLTFKEAIQKAQVSGQGHSLHEQIANLAGSPAIKKGILQSVKVVDELVKVMGHKPENIVIEMARENQTTQKGQKNSRERMKRIEEGIKELGSQILKEHPVENTQLQNEKLYLYYLQNGRDMYVDQELDINRLSDYDVDHIVPQSFIKDDSIDNKILTRSDKNRGKSDNVPSEEVVKKMKNYWRQLLNAKLITQRKFDNLTKAERGGLSELDKAGFIKRQLVETRQITKHVAQILDSRMNTKYDENDKLIREVKVITLKSKLVSDFRKDFQFYKVREINNYHHAHDAYLNAVVGTALIKKYTKLESEFVYGDYKVYDVRKMIAKSEQEIGKATAKRFFYSNIMNFFKTEITLANGEIRKRPLIETNEETGEIVWDKGRDFATVRKVLSMPQVNIVKKTEVQTGALTNESIYARGSFDKLISRKHRFESSKYGGFGSPTVTYSVLVVAKSKVQDGKVKKIKTGKELIGMTLLDKLVFEKNPLKFIEDKGYGNVQIDKCIKLPKYSLFEFENGTRRMLASVMANNNSRGDLQKANEMFLPAKLVTLLYHAHKIESSKELEHEAYILDHYNDLYQLLSYIERFASLYVDVEKNISKVKELFSNIESYSISEICSSVINLLTLTASGAPADFKFLGTTIPRKRYGSPQSILSSTLIHQSITGLYETRIDLSQLGGD

SEQ ID NO: 111 - protein, 1007 aa, Helicobacter canadensis
MKVLGFDIGINSIGWAFVENNELKDCGVRLFTKAENPKTKESLALPRRNARSSRVRLRRRRSRLLSLKHIISKEFGLHYEDYIALDGNLPKAYTGKIESIYKLRYEALSQAISKEDLARVILHIAKHRGYMNKNQKTSQDSEKGAILSAIKENSNKIKHYQTAGEYFYKELFENLRDGTKEFKNIRNKAMKNEKTGNMESTYYNTILASDLEKELKLILEKQQAYHNYSDTFIKEVLEIAFYQRPLKDFSHLVGSCTFYENEKRACKNSYSAWEFIALGKIINTLESIKKDTGEIFSNEIITQILKEVLDKGSLSYTKLRKMINLDEKVKFKGLKYDKEGVEKTNLIEFKKLKEFKKALGEHNLERKTLDEIATHITLTKDENQLKKQLEQYALSQNQIDALAELDFNDHINLSFKALYEILPLMEKGKRYDEACNELGLKAKTSNQKSEFLPAFCDSIFAQELTNPIVNRAISEYRKVLNRLLKKYGKMHKIHIELARDAGLSKEARNKIEKEQKENKDINDKAEKTCKEFGLKPNAKNILKIKLWREQGEICAYSGKKITIDDLKEDKALEVDHIYPYSRSYDDSYNNKVLVFIKENQLKLNQTPYEAFGSNQEKWSKIQVLAQKLPYKKKNRILDENFKNKDQIEFISRNLNDTRYATSLIAKYTKEYLEFLPLSDDEDISLKSGEKGSKTHVQTMNGMLTSVLRHAWGFSQKDRNNHLHHALDAIIIAYSTNSIIKAFSDFKKNQEILKAKLYAKKLTSEEYKNQSKFTGFEKYRSKILEKLDSIFVSKPPNKNTKGALHEQTFYSYQDILEEYKTQEGLKRALECGKVRKIGTKYVVNDRMVRLDIFKKDNKFYGIPIYTMDFALGVLPNKVVTIGTDKDKIKKEWKTIDETYEFCFSLYKGDLVLIQKKEMQESEFAYYNGFDISSASISLEKHDNKFENLTENQKLLFPKAKEGDVEVRGIGIQGLKVFKKYMVTPLGEIQETRTEARQNIQPRKKHGLR

SEQ ID NO: 112 - protein, 1397 aa, unidentified
  source 1..1397: note = Gammaproteobacteria
MTKNYISPIAIDLGAKFTGVALYQYLEGADCTQEVAKGLLVDDRGNVTWSQEGRRGKRHQVRGYKRRKMAKRLLWLILDSEYGIKREEVTEPLLKFINGLLNRRGYTYISEEVDEESMNVSPLPFSEMMPDYFNSSAPLLEQLAKLLSDKNKLVRFRAEGKIPSNKNEFKKLLDTALDGKYKDEKKELSEAWGNILIASENVLKSTVDGHKSRSEYLANIKEDIKSNEELEKQISSKEIDGFYNLVGHLSNFQLRLLRKYFNDPNMSGVSYWDEKRLEKYFYQWVQGWHTKGGTDEAEKKNIILKTKGAPLLKTLKSLSADLTIPPYEDQNNRRPPKCQSVLLSDEKLTMHYPKWKEWVGQLVKQNDNAYLNENVTLANALHRIVERSRSIDPYQLRLLISITDAEKRNDLAGYKRLKLSLGSEVDEFLLLVKNIVDETKEAREGLWFETENKLFFKCGKTPPRKEKLKSTLLSAVLGKNLSDDEQSSFIEEFWKSGTPKIERRNVRGWCRLASQVQKTYGVYLKEYGLQQLHKLEAGKKLDDKPLALLYKNSGLIASKIGEALNIEPDEVSRFASPHSLAQIFNIIEGDVAGFNKTCRACTYENIWRMQEEKVESLLTNQLLSEIHGERKVPLKSAMCTRLSADSTRPFDGQMASIIEHIARKIAQHKIAQINDVPKEFSIDIPIIIESNQFSFTAELEEIKRGRGSAKAKKAKELGEKSKAGWVSKTERIKTSSEGICPYTGAPLGGSGEIDHIIPRSLTGRTKKTVFNSEANLIYCSSKGNHDKGNRVYVIEQLNDKYLKKQFSTSDVNLIKKKIKTTIQRFTEGGEKLRSFSELSREDQKAFRHALFVPELKSEVTSLLAVKNITRVNGTQAWLAKKIASLLAEHLDKQGRDYTLSAHQIDPWSVSKQRKMLASAEPIWAKKDPQPAASHVVDAVCTFLEALEQPHTASRLKTISSTSFEKTGWRSALIPDLIKVDALDRRPKYRRYNIGSTSLFKDGIYAERFLPILIDENGLMAGYDIDNSLKAKGADVVFESLSPFLLFKGEEVGAQSLSDWQERIDGRYLYMSIDKVKAFDYLQEKVGEKDIAAELLNSIHFTQRKTELRAKFSDDSGKKMKTLDAIRKSLKLTVTVNEIGKRKEKCGFSGTIGIPAKSAWENLLDEPLLETYWGTKMPPQEIWEKVYRKHFPRNIPNQAHRKVRKDFSLPVVDSVSGGFRVKRKTPNGYNYQLLAIDGYSAVGFKKEGDNVDFKSPALVPQIAESKSVTPISSELVHLDKNEIVYFDEWRKIDISDSDLKQFVSSLELAPGSQNRFYIRFTVDEDQFERHFKSALRVNGIQDLDTVNKTFDWNREIPSLLIPPRSNLFLLETGQKITFEYIANGANAEVKKAYSLRRA

SEQ ID NO: 113 - protein, 1082 aa, Neisseria meningitidis
MAAFKPNPINYILGLDIGIASVGWAMVEIDEEENPIRLIDLGVRVFERAEVPKTGDSLAMVRRLARSVRRLTRRRAHRLLRARRLLKREGVLQAADFDENGLIKSLPNTPWQLRAAALDRKLTPLEWSAVLLHLIKHRGYLSQRKNEGETADKELGALLKGVADNAHALQTGDFRTPAELALNKFEKESGHIRNQRGDYSHTFSRKDLQAELILLFEKQKEFGNPHISGGLKEGIETLLMTQRPALSGDAVQKMLGHCTFEPAEPKAAKNTYTAERFIWLTKLNNLRILEQGSERPLTDTERATLMDEPYRKSKLTYAQARKLLGLEDTAFFKGLRYGKDNAEASTLMEMKAYHAISRALEKEGLKDKKSPLNLSPELQDEIGTAFSLFKTDEDITGRLKDRIQPEILEALLKHISFDKFVQISLKALRRIVPLMEQGKRYDEACAEIYGDHYGKKNTEEKIYLPPIPADEIRNPVVLRALSQARKVINGVVRRYGSPARIHIETAREVGKSFKDRKEIEKRQEENRKDREKAAAKFREYFPNFVGEPKSKDILKLRLYEQQHGKCLYSGKEINLGRLNEKGYVEIDHALPFSRTWDDSFNNKVLVLGSENQNKGNQTPYEYFNGKDNSREWQEFKARVETSRFPRSKKQRILLQKFDEDGFKERNLNDTRYVNRFLCQFVADRMRLTGKGKKRVFASNGQITNLLRGFWGLRKVRAENDRHHALDAVVVACSTVAMQQKITRFVRYKEMNAFDGKTIDKETGEVLHQKTHFPQPWEFFAQEVMIRVFGKPDGKPEFEEADTPEKLRTLLAEKLSSRPEAVHEYVTPLFVSRAPNRKMSGQGHMETVKSAKRLDEGVSVLRVPLTQLKLKDLEKMVNREREPKLYEALKARLEAHKDDPAKAFAEPFYKYDKAGNRTQQVKAVRVEQVQKTGVWVRNHNGIADNATMVRVDVFEKGDKYYLVPIYSWQVAKGILPDRAVVQGKDEEDWQLIDDSFNFKFSLHPNDLVEVITKKARMFGYFASCHRGTGNINIRIHDLDHKIGKNGILEGIGVKTALSFQKYQIDELGKEIRPCRLKKRPPVR

SEQ ID NO: 114 - protein, 1334 aa, Listeria monocytogenes
MKKPYTIGLDIGTNSVGWAVLTDQYDLVKRKMKISGDSEKKQIKKNFWGVRLFEKGETAAKRRMSRTARRRIERRRNRISYLQEIFAIQMNEVDDNFFNRLKESFYAESDKKYNRHPFFGTVEEEVAYYKDFPTIYHLRKELIDSQKKADLRLVYLALAHIIKYRGHFLIEGALDTKNTSIDEMFKQFLQIYNQVFANDIEEASLKKTEKNQEVAQILAEKFTRKDKLDKILSLYPGEKTTGVFAQFVNIIVGSTGKFKKHFNLHEKKDINCAEDTYDTDLESLLAIIGDEFAEVFVAAKNAYNAVVLSNIITVTDSTTRAKLSASLIERFENHKEDLKKMKRFVRTYLPEKYDEIFDDTEKHGYAGYISGKTKQADFYKYMKATLEKIEGADYFIAKIEEENFLRKQRTFDNGVIPHQLHLEELEAILHQQAKYYPFLREDYEKIKSLVTFRIPYFVGPLAKGQSEFAWLTRKADGEIRPWNIEEKVDFGKSAVDFIEKMTNKDTYLPKENVLPKHSLCYQKYMVYNELTKVRYIDDQGKTNYFSGQEKQQIFNDLFKQKRKVKKKDLELFLRNINQIESPTIEGLEDSFNASYATYHDLLKVGMKQEILDNPLNTEMLEDIVKILTVFEDKRMIKEQLQQFSDVLDGTVLKKLERRHYTGWGRLSAKLLVGIRDKQSHLTILDYLMNDDGLNRNLMQLINDSNLSFKSIIEKEQVSTTDKDLQSIVAELAGSPAIKKGILQSLKIVDELVSVMGYPPQTIVVEMARENQTTNKGKNNSKPRYKSLEKAIKEFGSQILKEHPTDNQELKNNRLYLYYLQNGKDMYTGQELDIHNLSNYDIDHIVPQSFITDNSVDNLVLTSSAGNREKGDNVPPLEIVQKRKIFWEKLYQGNLMSKRKFDYLTKAERGGLTEADKARFIHRQLVETRQITKNVANILHQRFNYKTDGNKDTMETVRIVTLKSALVSQFRKQFQFYKVREVNDYHHAHDAYLNGVVANTLLKVYPQLEPEFVYGEYHQFGWFKANKATAKKQFYTNIMLFFAQKDRIIDENGEILWDKRYLETVKKVLGYRQMNIVKKTEIQKGEFSNVTPNPKGKSNKLIPRKKDWDPIKYGGFDGSKMAYAIIIEYEKQKRKVRIEKKLIQINIMEREAFEKDEKTFLEEKGYHQPKVLIKVPKYTLYECKNGRRRMLGSANEAHKGNQMLLPNHLMALLYHAEKYEAIDGESLAYIEVHRALFDELLAYISEFARKYTLSNDRLDEINMLYERNKDGDVKSIAESFVSLKKFNAFGVHQDFSFFGTKIERKRDRKLNELLNSTIIYQSITGLYESRKRLDN

SEQ ID NO: 115 - protein, 1337 aa, Enterococcus faecalis
MKKDYVIGLDIGTNSVGWAVMTEDYQLVKKKMPIYGNTEKKKIKKNFWGVRLFEEGHTAEDRRLKRTARRRISRRRNRLRYLQAFFEEAMTALDENFFARLQESFLVPEDKKWHRHPIFAKLEDEVAYHETYPTIYHLRKKLADSSEQADLRLIYLALAHIVKYRGHFLIEGKLSTENISVKEQFQQFMIIYNQTFVNGESRLVSAPLPESVLIEEELTEKASRTKKSEKVLQQFPQEKANGLFGQFLKLMVGNKADFKKVFGLEEEAKITYASESYEEDLEGILAKVGDEYSDVFLAAKNVYDAVELSTILADSDKKSHAKLSSSMIVRFTEHQEDLKKFKRFIRENCPDEYDNLFKNEQKDGYAGYIAHAGKVSQLKFYQYVKKIIQDIAGAEYFLEKIAQENFLRKQRTFDNGVIPHQIHLAELQAIIHRQAAYYPFLKENQEKIEQLVTFRIPYYIGPLSKGDASTFAWLKRQSEEPIRPWNLQETVDLDQSATAFIERMTNFDTYLSSEKVLPKHSLLYEKFMVFNELTKISYTDDRGIKANFSGKEKEKIFDYLFKTRRKVKKKDIIQFYRNEYNTEIVTLSGLEEDQFNASFSTYQDLLKCGLTRAELDHPDNAEKLEDIIKILTIFEDRQRIRTQLSTFKGQFSAEVLKKLERKHYTGWGRLSKKLINGIYDKESGKTILGYLIKDDGVSKHYNRNFMQLINDSQLSFKNAIQKAQSSEHEETLSETVNELAGSPAIKKGIYQSLKIVDELVAIMGYAPKRIVVEMARENQTTSTGKRRSIQRLKIVEKAMAEIGSNLLKEQPTTNEQLRDTRLFLYYMQNGKDMYTGDELSLHRLSHYDIDHIIPQSFMKDDSLDNLVLVGSTENRGKSDDVPSKEVVKDMKAYWEKLYAAGLISQRKFQRLTKGEQGGLTLEDKAHFIQRQLVETRQITKNVAGILDQRYNANSKEKKVQIITLKASLTSQFRSIFGLYKVREVNDYHHGQDAYLNCVVATTLLKVYPNLAPEFVYGEYPKFQAFKENKATAKAIIYTNLLRFFTEDEPRFTKDGEILWSNSYLKTIKKELNYHQMNIVKKVEVQKGGFSKESIKPKGPSNKLIPVKNGLDPQKYGGFDSPVVAYTVLFTHEKGKKPLIKQEILGITIMEKTRFEQNPILFLEEKGFLRPRVLMKLPKYTLYEFPEGRRRLLASAKEAQKGNQMVLPEHLLTLLYHAKQCLLPNQSESLAYVEQHQPEFQEILERVVDFAEVHTLAKSKVQQIVKLFEANQTADVKEIAASFIQLMQFNAMGAPSTFKFFQKDIERARYTSIKEIFDATIIYQSTTGLYETRRKVVD

SEQ ID NO: 116 - protein, 1426 aa, Capnocytophaga ochracea
MKNILGLDLGTTSIGFAHIVEDENKEKSEIKELGVRIVSLTTDEQSDFEKGKSITTNANRTLKHGARLNLDRYQQRRKYLIDLLQKANLITPSSILAENGKNTTHSTWQLRAKAVTERIEKEEFARILLAINKKRGYKSSRKAKTEDEGQAIDGMAIAKRLYDENLTPGQLSLQLLQQNKKLLPDFYRSDLQKEFDLVWNFQKQFYPDILTDIFYKELQGKGKDATSKAFSKRYHFDTTENKGSKESVRLQAYQWRAEAISKQLSKEEVAYVLTEINNNLNNASGYLGAISDRSKELYFNRQTVGQYLYAKLQENRHNSLKNKVFYRQDYLDEFERIWETQASFHKELTDELKKQIRDVVIFYQRKPKSQKGLISFCEFESKEIEIEKDGKTITKNIGARVVPKSSPLFQEFKIWQILNNVICKRKGIRKKKISAKTTQLDLLNESSQTIFSLDMECKQLLFDELNLKGDLKSDKVLKLLGYSPQEWEINYNQLEGNRTQKALYEAYLKIVEMEAHDVKDILQIKSAKDDWSLDESPLSASEIREKVKAIFQTLGICTKILYFDPLLPVKEFEEQDSYQLWHLLYSYESDDSTSGNETLYRILEKKYAFKREHARILANVALQDDYGSLSTKAIRKIYPNIKENQYSTACEKAGYKHSKLSLTTEELEARELKNIIPLLKKNALRNPVVEKILNQMINVVNALIEKNSERDAEGKITKYFHFDEIRIELARELKKNAQKRYEMTQNINKAKLEHQKISEILQKEFGIKNPTKSDIIRYRLYQELEHNGYKELYTNAPIARDMLFSKNIEIEHIVPKARVFDDSFSNKTLTFHRINSDKGEYTAFDYITSLNSEEELNQYLTRVENAYKTKSISPTKYKNLLKKASEIGDDFINRDLRDTQYIAKKAKEILFQVTKNVLSTSGSITDRLREDWGLVDVMKELNMPKYQSLGLTEVEERKDGNKVTVIKNWTKRNDHRHHAMDALTVAFTKPSYIQYLNHLNARKDENNKNYSVILAIEEKETIKVPTNNGKNKRVFIEPIPNFRQVAKKHLEEIFISHKAKNKVVTKNTNKPAGTDKQQITLTPRGQLHKETIYGKYQYYINKEEKIGVKFDERTIAKVSNPVYREALLKRLQANDNDPKKAFAGKNALSKNPIYLDESKTKTLPEKVNLTYLEEDFSIRKDISPDNFKDLKSIEKVIDQGVKRILIKRLQAYDNDPKKAFVDLEKNPIWLNKEKGIAIKRVTISGVNNAQPLHIGKDHLGKTTLNKEGKEIPVDYVSTGNNHHVAIYRDKEGNLQEQIVSFFDAVVRAQQGIPIIDKTYKQAEGWQFLFTMKQNEMFVFPNATTGFNPAEIDLLDPKNKKLISPNLFRVQKIATKDYFFRHHLETNVETDNILKNVTWKREGLSGLKDIVKVRINHLGDIVSIGEY

SEQ ID NO: 117 - protein, 1424 aa, Parabacteroides sp.
MKRILGLDLGTNSIGWALVNEAETDEEVSSIIRLGVRVNPLTVDETQNFEKGKSITTNAERTLKRSMRRNLQRYKLRRDALVEFLKELGFITDETILSEQGNRTTFETCRLRAKAAEEEISLEELSRVLLMINKKRGYKSSRKVKKEEDGVLIDGMEIAKKLYEEDLTPGQLCSQLLESGKKVLPDFYRSDLQEELDRIWSVQKQFHPDVFCDAAKEEIKGKNRSQTWAILANYFVWKEEVVGWNDREAKNETIEKECKLVGLKRTTKGYELKKENYRWRAQALTEQLGLEEIAVVLQEINGQINASSGYLGAISDRSKVLYFNHQTVGQYQMAELDKNPHASLRNMVFYRQDYLDEFDRIWEKQAEFHKELTAELKKEIRDMIIFYQRRLKSQKGLISFCEFERLEIVVEKDGKKQTKVIGCKVIPRSHPLFQEFKVWQTLNDIKVLGREKKRNALSASESRALYPEEKEILARELAIKENMKKADVLKLLFENPQELDLNFKQIDGNRTGFSLFSAYSKMIEKYGYEPLDFKKPADEIIGQLRTIFTDLGWNTNLFTIDLTKEGKELEMQPYFRLWHLLYSFEGDNTSTGNGKLIEKIMQLCGVEKEYAVELASLSFQDDYGSLSAKAIKRILPYLKEGNLYDVACEYAGYRHSKSSLTKEEIENKVLKGKLEVLPKNSLRNPVVEKILSQMVNVINTIIDTYGKPDEIRVELARELKKSAKEREELTKAIAKSTREHEEIRKLLQDEFGMMNVSRNDIIRYKLYEELKDNGYKTLYSNQYIPKEKIFSKEIDIEHIIPQSRLFDDSLSNKTLEYKAINIEKGNKTAYDFVKEKYGEEGLQQYINRCESLFNDKKAKLRKLKMEQKDIPDGFIDRDLRNTQYIAKKALAMLNEICRRVVATTGSITDQLREDWQLVDVMKELNLPKYEALGFVETYEDKDGRKIKRIKDWTKRNDHRHHAMDALTVAFTKDAFIQYFNNKNAAQDSGNRNHTNIIGIKTRYFDKGRALPPIPLEQFRIEAKQHLEKLLVSIKAKNKVVTVNVNRTKKRKGENTKIQQTPRGQLHLETVYGSHKQYVTKIEKVNASFDAAKIATVSKRAYRNALLKRLETFGNDPKKAFTGKNALEKNPLYADKYQTIRVPEKVQTVEFETIYTIRKPVDPALNVDKVVDVKVRAILERRLKEYGGDPKKAFVNFWENPIWLNKEKGISIKRVSIRGINNAQSIHVKKDKNGNPIWDENGKQIPVDFVNTGNNHHVAIYRKPVLDKKGQVTFDEDGNLMYELDEVVVPFFEAVTRANLGLPIIDKDYRKSEGWQFLFSMKQNEYFVFPNEKTGFNPKEVDLLNPDNYAMISPNLFRVQTMSKVMYGNNVVRDYKFRHHLETTVKDMKELKDIAYKQYKTLSFGNSVVKIRINHIGQIVSVGEY

SEQ ID NO: 118 - protein, 1395 aa, Lactobacillus jensenii
MKEIKDYIIGLDIGTNSCGYVVTDKQNNILKLKGKTAIGARLFKEGQAAADRRSFRTTRRRLARRHWRLGLLEEIFDPEMEKIDPNFFRRLKESDYSPKDSRKQFNAIVFKSIKADKRFYKKYPTIYHLRNALMHDNQKHDLREIFMAVHHIVKYRGNFLREDSVNAFKAAKFSLRGEDGIGPVDKLNDLLKEIYSEYSPELATNNLSKIEDIIKDKNLYKQDKLKQVATLLIKEADSKDKAKLNKDIAKQVANSFMGYMFRLDTLFSLTDVDVKDYKLKFSDANIDESLDDLTSLLTDAQIEFVLELQSIYNTIVLNEIVPDGMSLSESMIKKYDDHKEDLKIFKEYIDSLSDQKKAKKLLSAYNLYVNYRKSDLVEAKNLFKNKKVGDKNFADVISNFEVFGKFVSDNLDDSELANKIKARLDLGEFLPKQRTNQNGVIPYQLHQVELTQILEKQGKYYPFLITPNPVESHRNNAPYEISELVSFRVPYYVGPLIDNQSIKDKQNKNKFAWMVRQKQGQITPWNLEEMVDTTESANQFIKRMTRKDTYLLAEDVLPKSSLVYQKFMILDELNRIKIDGKKLTSELKHDIFEKLFKKQKSINLDNLKNYLLVEGNIPGLIEGLSDGINFNNSFSTYIDYRNIFGDEIDNPNKQADFEKMIEWSTVFEDRKIFKRKLKEITWLTSEQIKQVSSKRYSGWGRLSKKLLTQITDENGVNILQRLWNEPETLTEVLANPVIKRKIVEANSSFTKAKDMKDILVEAYTSPQNKKAIRQVMRVVDDIIAAAHGKKPSQIAIEFAREDQDNPQMTKSRKAQLDQIYAKISDEFLDDAVKNELKNMKDNKPLAKDKVFLYFKQMGRDAYSGEKLSLDNLQDYDIDHIYPQSFIKDDSFDNRVLVQRAYNNGKSDNVPVLLFGNKIAAGLGITIRQMWKKWLELGLISKRKFNNLITDPEKISRNMASGFVNRQLVETSQVIKLVANILQAKLPDTEIIEVKASYNSILRKEFNLYKSREVNDYHHAIDAYLTTIVGNYLYQVYPKLRPYFVYGQFKKFGKAENQEDDPVKKIKKFNFIYQLIWGKDDAICISHTNQQVFSKKDIIDKLTTAYNFKYMNISHAVYTRNNNMFKQTLFPIIERTTAKTKSLIPKKLDRPTDIYGGYSNNNDAYLALVKVDKKRGSEYRVVGIPMRAAAMLKASKNYDEDLRKVIEPMVMFDKNGKAKRGIEGFRVLVGKMPFKQAVLDGNKKFMLTGTVDTPNLKQLVLSQQNMKYILDYIEDVDCRKHKFGDKVQNPDKCLLEVFDEIIEIVDKYFELFDSRDFREKLRNSRNKFIKLEASKKADTILAILKGLQAKSTRATIKELNISDFGRIITSSISPEAQLIYQSPTGLFERRVKVKDL

SEQ ID NO: 119 - protein, 1140 aa, Roseburia intestinalis
MRENGSDERRRNMDEKMDYRIGLDIGIASVGWAVLQNNSDDEPVRIVDLGVRIFDTAEIPKTGESLAGPRRAARTTRRRLRRRKHRLDRIKWLFENQGLINIDDFLKRYNMAGLPDVYQLRYEALDRKLTDEELAQVLLHIAKHRGFRSTRKAETAAKENGAVLKATDENQKRMQEKGYRTVGEMIYLDEAFRTGCSWSEKGYILTPRNKAENYQHTMLRAMLVEEVKEIFSSQRRLGNEKATEELEEKYLEIMTSQRSFDLGPGMQPDGKPSPYAMEGFSDRVGKCTFLGDQGELRGAKGTYTAEYFVALQKINHTKLVNQDGETRNFTEEERRALTLLLFTQKEVKYAAVRKKLGLPEDILFYNLNYKKAATKEEQQKENQNTEKAKFIGMPYYHDYKKCLEERVKYLTENEVRDLFDEIGMILTCYKNDDSRTERLAKLGLVPIEMEGLLAYTPTKFQHLSMKAMRNIIPFLEKGMTYDKACEEAGYDFKADSKGTKQKLLTGENVNQTINEITNPVVKRSVSQTVKVINAIIRTYGSPQAINIELAREMSKTFEERRKIKGDMEKRQKNNEDVKKQIQELGKLSPTGQDILKYRLWQEQQGICMYSGKTIPLEELFKPGYDIDHILPYSITFDDSFRNKVLVTSQENRQKGNRTPYEYMGNDEQRWNEFETRVKTTIRDYKKQQKLLKKHFSEEERSEFKERNLTDTKYITTVIYNMIRQNLEMAPLNRPEKKKQVRAVNGAITAYLRKRWGLPQKNRETDTHHAMDAVVIACCTDGMIQKISRYTKVRERCYSKGTEFVDAETGEIFRPEDYSRAEWDEIFGVHIPKPWETFRAELDVRMGDDPKGFLDTHSDVALELDYPEYIYENLRPIFVSRMPNHKVTGAAHADTIRSPRHFKDEGIVLTKTALTDLKLDKDGEIDGYYNPQSDLLLYEALKKQLLLYGNDAKKAFAQDFHKPKADGTEGPVVRKVKIQKKQTMGVFVDSGNGIAENGGMVRIDVFRVNGKYYFVPVYTADVVKKVLPNRASTAHKPYGEWKVMEDKDFLFSLYSRDLIHIKSKKDIPIKMVNGGMEGIKETYAYYIGADISAANIQGIAHDSRYKFRGLGIQSLDVLEKCQIDVLGHVSVVRSEKRMGFS

SEQ ID NO: 120 - protein, 992 aa, Treponema vincentii
MQKNSGEDENCGFEFLTEEEKELIKPLFFRISKPSFQFADIEKKLKGKNGFWKFNYRKDTNVSGCPVSAGLKNIFGDEASAESWKDKKVGQYDMCDIWHVLFDFDDEEKLLEFAKRKLFLSDEAAKKFCAIRIQQGYANLSLKAIRKITPFLRKGYIYSTAVFLANIPFMIGRDIFLQNEKEIEDSVKNIIGTLRDKNNIIVLANRCIESAFKDKDNDFRFEEWDKALVENSAWDLFGKKKWNEYDEEKRKTIISQVSEKVEDNLKIAVGKNPNDYKYPLLRTDDLIMDYLNQKGFVVKGELYHPSDTDYNFETPVPAEDGKIYLASPRSPSVKNPVVMRALHQLRKLVNYLIKTGKIDSTTKINVELANDVNDKNQRKAIEELAKTNEKNNADARKKIEELCNEAGFKVVPTESDIKKFRLWKEQNETCPYTGKHISFTDLFGPIPKFDFEHTIPRSLSYDDSLENLTLCDSEFNRNIKKQRLPSELPDFEEINKRFLKFYEDKIDNCLRIIELNSKSGGSYEEPAVKDLRIVKKHKAQYELNYYKEKLRRFSSTEITSGFKHSQLNDTRIITKFSLSYLKGVFDHVQPVKGSMTDTFKRQWGLMERNEIKDRSNHTHHTVDALTVACINRGKFNLLSEAIKNSSDGKHLKFPKPWETFDTDVLNAVRYIIPKYFSDESSLRQSKKILRGRDGKPVLKNGKAVFIQGATARGSLHKDTFYGCIKTVPEKGGKSEMIFVQRIPVSTLDEKVAEKIIDKRIRKTFEKNLSTGIQTLQEIQTDGILLPFKKEGRDVFVKRVRIKAHPTSPIILKKHHNVINKNPKDYKQNYYVENEENYLLAIYRGKDAKGKDVSDHKLCNLLNAVKSRQNKTGFYPDFKEKKGINLQLYKVLKIGKIVILQNDIQEDVFALPKEKLWKRMYRIAGLATSRNDIQIKLVHIIRETPWGYMKGEKDLNAGKECLLYGTANFKGLVEGQDFTVSPAGEIIQKARVC

SEQ ID NO: 121 - protein, 1340 aa, Enterococcus faecium
MKKEYTIGLDIGTNSVGWSVLTDDYRLVSKKMKVAGNTEKSSTKKNFWGVRLFDEGQTAEARRSKRTARRRLARRRQRILELQKIFAPEILKIDEHFFARLNESFLVPDEKKQSRHPVFATIKQEKSYHQTYPTIYHLRQALADSSEKADIRLVYLAMAHLLKYRGHFLIEGELNTENSSVTETFRQFLSTYNQQFSEAGDKQTEKLDEAVDCSFVFTEKMSKTKKAETLLKYFPHEKSNGYLSQFIKLMVGNQGNFKNVFGLEEEAKLQFSKETYEEDLEELLEKIGDDYIDLFVQAKNVYDAVLLSEILSDSTKNTRAKLSAGMIRRYDAHKEDLVLLKRFVKENLPKKYRAFFGDNSVNGYAGYIEGHATQEAFYKFVKKELTGIRGSEVFLTKIEQENFLRKQRTFDNGVIPHQIHLSELRAIIANQKKHYPFLKEEQEKLESLLTFKIPYYVGPLAKKQENSPFAWLIRKSEEKIKPWNLPEIVDMEGSAVRFIERMINTDMYMPHNKVLPKNSLLYQKFSIYNELTKVRYQDERGQMNYFSSIEKKEIFHELFEKNRKVTKKDLQEFLYLKYDIKHAELSGIEKAFNASYTTYHDFLTMSENKREMKQWLEDPELASMFEEIIKTLTVFEDREMIKTRLSHHEATLGKHIIKKLTKKHYTGWGRLSKELIQGIRDKQSNKTILDYLINDDDFPHHRNRNFMQLINDDSLSFKKEIKKAQMITDTENLEEIVKELTGSPAIKKGILQSLKIVDEIVGIMGYEPANIVVEMARENQTTGRGLKSSRPRLKALEESLKDFGSQLLKEYPTDNSSLQKDRLYLYYLQNGRDMYTGAPLDIHRLSDYDIDHIIPRSFTTDNSIDNKVLVSSKENRLKKDDVPSEKVVKKMRSFWYDLYSSKLISKRKLDNLTKIKLTEEDKAGFIKRQLVETRQITKHVAGILHHRFNKAEDTNDPIRKVRIITLKSALVSQFRNRFGIYKVREINEYHHAHDAYLNGVVALALLKKYPQLAPEFVYGEYLKFNAHKANKATVKKEFYSNIMKFFESDTPVCDENGEIFWDKSKSIAQVKKVINHHHMNIVKKTEIQKGGFSKETVEPKKDSSKLLPRKNNWDPAKYGGLGSPNVAYTVAFTYEKGKARKRTNALEGITIMEREAFEQSPVLFLKNKGYEQAEIEMKLPKYALFELENGRKRMVASNKEAQKANSFLLPEHLVTLLYHAKQYDEISHKESFDYVNEHHKEFSEVFARVLEFAGKYTLAEKNIEKLEKIYKENQTDDLAKLASSFVNLMQFNAMGAPADFKFFDVTIPRKRYTSLTEIWQSTIIHQSITGLYETRIRMGK

SEQ ID NO: 122 - protein, 1363 aa, Lactobacillus rhamnosus
MTKLNQPYGIGLDIGSNSIGFAVVDANSHLLRLKGETAIGARLFREGQSAADRRGSRTTRRRLSRTRWRLSFLRDFFAPHITKIDPDFFLRQKYSEISPKDKDRFKYEKRLFNDRTDAEFYEDYPSMYHLRLHLMTHTHKADPREIFLAIHHILKSRGHFLTPGAAKDFNTDKVDLEDIFPALTEAYAQVYPDLELTFDLAKADDFKAKLLDEQATPSDTQKALVNLLLSSDGEKEIVKKRKQVLTEFAKAITGLKTKFNLALGTEVDEADASNWQFSMGQLDDKWSNIETSMTDQGTEIFEQIQELYRARLLNGIVPAGMSLSQAKVADYGQHKEDLELFKTYLKKLNDHELAKTIRGLYDRYINGDDAKPFLREDFVKALTKEVTAHPNEVSEQLLNRMGQANFMLKQRTKANGAIPIQLQQRELDQIIANQSKYYDWLAAPNPVEAHRWKMPYQLDELLNFHIPYYVGPLITPKQQAESGENVFAWMVRKDPSGNITPYNFDEKVDREASANTFIQRMKTTDTYLIGEDVLPKQSLLYQKYEVLNELNNVRINNECLGTDQKQRLIREVFERHSSVTIKQVADNLVAHGDFARRPEIRGLADEKRFLSSLSTYHQLKEILHEAIDDPTKLLDIENIITWSTVFEDHTIFETKLAEIEWLDPKKINELSGIRYRGWGQFSRKLLDGLKLGNGHTVIQELMLSNHNLMQILADETLKETMTELNQDKLKTDDIEDVINDAYTSPSNKKALRQVLRVVEDIKHAANGQDPSWLFIETADGTGTAGKRTQSRQKQIQTVYANAAQELIDSAVRGELEDKIADKASFTDRLVLYFMQGGRDIYTGAPLNIDQLSHYDIDHILPQSLIKDDSLDNRVLVNATINREKNNVFASTLFAGKMKATWRKWHEAGLISGRKLRNLMLRPDEIDKFAKGFVARQLVETRQIIKLTEQIAAAQYPNTKIIAVKAGLSHQLREELDFPKNRDVNHYHHAFDAFLAARIGTYLLKRYPKLAPFFTYGEFAKVDVKKFREFNFIGALTHAKKNIIAKDTGEIVWDKERDIRELDRIYNFKRMLITHEVYFETADLFKQTIYAAKDSKERGGSKQLIPKKQGYPTQVYGGYTQESGSYNALVRVAEADTTAYQVIKISAQNASKIASANLKSREKGKQLLNEIVVKQLAKRRKNWKPSANSFKIVIPRFGMGTLFQNAKYGLFMVNSDTYYRNYQELWLSRENQKLLKKLFSIKYEKTQMNHDALQVYKAIIDQVEKFFKLYDINQFRAKLSDAIERFEKLPINTDGNKIGKTETLRQILIGLQANGTRSNVKNLGIKTDLGLLQVGSGIKLDKDTQIVYQSPSGLFKRRIPLADL

SEQ ID NO: 123 - protein, 1234 aa, Prevotella tannerae
MPNFWSIFTENLQTYLMKTRILGLDTGTNSLGWAVVDRDENNQYTPICRGDLIFTEGVKQEKGIEFSLAAERTSYRASRRHYFRRRLRKVEVLKVLVKHKLCPPLSDEALNRWHTKKEYPLDEDFILWQRTNEADNKNPYHDRHICLHRKLNLKDSQTDRYTLGRALYHLTQRRGFLSNRLDQNEEAEETGKVKSAISELSKEMKEAGCEFLGDYFYLLYRTEGNRVRIRSRYTDREKHYLQEFKEICRVQELDEDLAKALEKTIFFQRPLKSQRQGVGKCTMEKGHSRCAVSHPLYEEYRLLCYLNNIRIKTPSDDRLRPLNAEEREKITPLFYKEKNFDFEKIAKKLAGKTPFGWIRDAEDWPYQFNYRMTQEAPACPTTAQLIKVFGEDWKAALAETYTMSAKQDGTLKTEDEICTDIWNVLYSFSSKEKLKEFGLKKLQLDEVQAKAFSEIRLTRDFASLSLKAIRKILFFLRTGEDYSKAIFLANIPTIVGEEIWNDIERRSRLLYKVDLALRPQEERDAEEHRTIAERIKAAVAAEVPDAPIDLLYHPSMIEAYPDAKRNERFDCYQLGSPKTNAVRNPMAMRSLHMVRKVINHLLRKHIIDEKTEIHIEYARELNDANKRQAIADWQRELSKRHTAYAQNIRQLYKAETGLVIEPTKADILKYQLWEEQQHVCLYTGKKIGIADFLGANPKFDIEHTIPRSRGGDSTQENLTLCESKFNRDIKRDKLPTELANYEEILARIEHWKKQCYALKLKRDGIRTHSGLEKSIKDSRIRRRHLVGLEYGYLKGKYDRFTMKEVPEGFSRRQGAGIGLISKYAGLFLKSLFKDPKNPNRSNVYVVKGAITAEFRKLWGLQQADEAKSRENHTHHCIDAYTIACIGPCEYAALAAYYRSDEEFKYGRRREKPQFEKPWPTFTEDLLKLQEELLIVHQTTDKLGKRDRRKVKTPRGKFLTGGDSARGRLHQETYYGAINYDGNIKYVVRKPLDSLTEKDLDKIVDETVMGIVKGAVEAKGSLKEALADGIYMNKEKGILIKRVRIFSDVSEPINLKQLRDVSTKEYKRHIHLRKDENYLFAIYEGIDKKKNKKQTETATVDYLDAAKFYKDSKRRDKANSLVGDYSKKNKLPLKCILKKRQMVLFYEHSPEEIRFKDKKDLSRRLYIVTSIAKDGRVKFLHHQAATATGIQSSPSPFTNDGEHQPYYRLSASNIKVLVAGIDFDINILGEITPKL

SEQ ID NO: 124 - protein, 1496 aa, Prevotella veroralis
MKTILGLDLGTNSIGWAKVCVDDNGNYLRDIKLGSRIIPMSQDVLGNFDKGVTESQTSVRTGFRGVRRIRERSLLRRERLHRVLHVLGYLPPHYDSAIGWNKNEPSTYGKFLNHGEPKLAWEHKEDGSMRFLFMESFHEMMADFAKSQPSLVSDGKKIPLDWTIYYLRKKALSQPIRKEELAWLLLNFNQKRGYYQLRGEEDDDNPTKCEEYYELKVVGIEADEEGKNGNTWYNVKLENGWIYRRQSKIPLDDWIGKVREFIVTTEYEKDGITLKKDKNGDVKRSFRSPSEDDWGLRKKRTEKLLDSSKMTVGAFVYDHLLAEPSDKIRGKFIRTIERKYYKKELYAILCEQSKYHEELRSGDYLNKCAEELYKNNQPHRNSLLTKDLAYLLLEDLIFYQRPLKTKKSLIAECPYEAYKYVDKETGEIKRQGIKCIAKSNPYYQEFRLWQFISNLRLFNKADDKEVTADYLPTQDDYVRLFAYLNDRKEINQETLLKEFFKLKKITVNSEKVFPIRWNYIEDKEKKYPCNETRHELLLALDRARIDHSWLEKPGQEYRLWHLLYSVESKEETKEALRKLKDDDAFVESFLKVKPFKREYGAYSEKAIKKLLAVMRMGSLWRETDICDTTKGNITKILQGEIDEKLKEKISASVSSYNQLSDFQGLPVWLACYVVYGRHSEAAEIQHWKTPESLLAYINGFKQHSLRNPIVEQCILETLRTVHDIWKEVGHIDEIHVELGRNMKSTADQRARISENVLRNENTNLRIKSLLLELKNDPNIKDVRPYSPMQQEKLRIYEEGVLQELTKDDKDFTEITKISTMAQPSAKELQRYKLWLEQKYRSPYTGKSISLTKLFTSAYQIEHVIPQSRYFDDSFSNKVICESEVNSLKDNMLGYEFIKNHGGEIIHCTMLGDVKVLSESEYKAFVNDHYAHNKRKRENLLLEDIPQEFLNRQMNDSRYISKVVKALLSNIVRAEGEEEATSKFVVSCSGGITDRLKKDWGLNDVWNKIVYPRFERLNRLTGTEAFGQWENKDGKRVFQTAVPLELQRGFNKKRIDHRHHAMDALVIACTSRNIINYLNNESANNPKKREDLRQKLCDKNRTIRKPWETFTQDATAALEDVIVSFKNYVRIINKATNYYERYDVEGKKVIAEQRGDDMWAIRKPMHEATYYGRVNLRRKKKVNLRVALENISSICDNKLRIYINGLVEKGFNTKQILDKFKNTNDHFSMQKIDKVEIWQFTNEEEKLVATRKPLDTSFDTKKIASITDTGIQTILLNYLETKGGDSTIAFTPEGIVEMNQNISKYNNGKEHMPILKVRLYTKLGKKIPVGQTGCKAKQFVIAEAGTNLYFAIYEDEEGKRSYRTIPLNEVVERLKQGLSPVPEKNDKDVHLKFYLSPNDLVYVPIEDEHESLAKDHIYKFVDSSGTTANFIPHRSANVIFELNKKDAEKFCSGSIIQNEYGVGSSQSKNQKAITGEMIKAVCRKLEVDRLGNVIKVI

SEQ ID NO: 125 - protein, 1082 aa, Neisseria cinerea
MAAFKPNPMNYILGLDIGIASVGWAIVEIDEEENPIRLIDLGVRVFERAEVPKTGDSLAAARRLARSVRRLTRRRAHRLLRARRLLKREGVLQAADFDENGLIKSLPNTPWQLRAAALDRKLTPLEWSAVLLHLIKHRGYLSQRKNEGETADKELGALLKGVADNTHALQTGDFRTPAELALNKFEKESGHIRNQRGDYSHTFNRKDLQAELNLLFEKQKEFGNPHVSDGLKEGIETLLMTQRPALSGDAVQKMLGHCTFEPTEPKAAKNTYTAERFVWLTKLNNLRILEQGSERPLTDTERATLMDEPYRKSKLTYAQARKLLDLDDTAFFKGLRYGKDNAEASTLMEMKAYHAISRALEKEGLKDKKSPLNLSPELQDEIGTAFSLFKTDEDITGRLKDRVQPEILEALLKHISFDKFVQISLKALRRIVPLMEQGNRYDEACTEIYGDHYGKKNTEEKIYLPPIPADEIRNPVVLRALSQARKVINGVVRRYGSPARIHIETAREVGKSFKDRKEIEKRQEENRKDREKSAAKFREYFPNFVGEPKSKDILKLRLYEQQHGKCLYSGKEINLGRLNEKGYVEIDHALPFSRTWDDSFNNKVLALGSENQNKGNQTPYEYFNGKDNSREWQEFKARVETSRFPRSKKQRILLQKFDEDGFKERNLNDTRYINRFLCQFVADHMLLTGKGKRRVFASNGQITNLLRGFWGLRKVRAENDRHHALDAVVVACSTIAMQQKITRFVRYKEMNAFDGKTIDKETGEVLHQKAHFPQPWEFFAQEVMIRVFGKPDGKPEFEEADTPEKLRTLLAEKLSSRPEAVHKYVTPLFISRAPNRKMSGQGHMETVKSAKRLDEGISVLRVPLTQLKLKDLEKMVNREREPKLYEALKARLEAHKDDPAKAFAEPFYKYDKAGNRTQQVKAVRVEQVQKTGVWVHNHNGIADNATIVRVDVFEKGGKYYLVPIYSWQVAKGILPDRAVVQGKDEEDWTVMDDSFEFKFVLYANDLIKLTAKKNEFLGYFVSLNRATGAIDIRTHDTDSTKGKNGIFQSVGVKTALSFQKYQIDELGKEIRPCRLKKRPPVR

SEQ ID NO: 126 - protein, 1512 aa, Fibrobacter succinogenes
MKKILGLDLGTNSIGWAVVNADEITRDDGSRYLKPNGISAAGSRIIPMSADILGDFEKGNSISQTAERTRMRMARRLHERALLRRERLLRVLNLLDFLPKHFADKIDRYGKFTDDSEPKLAWRKNTEGKYEFIFQDAFNEMLAEFKDKQPEIVEEGKKIPYDWTIYYLRKKALEKALSKEELSWILLQFNQKRGYYQLRGEEEEIPQDKKIEYLAQKVVKVEATDQKKGDDVWYNVYLENGMIYRRTSKAPLDWEGKVKEFIVTTEVENDGETPKKDKEGNIKRSFRAPKEDDWTLLKKKTEADIENSHKTVGCYIYDSLLNNPKQKIIGKLVRTVERKFYKEELTQILKKQVELIPELRDDNLYKQCIEELYPINEAHRNTIAKTDFANLFINDILFYQRPLKSKKSQIDNCPYEERIFIDSKTGEKKKVPVKCIAKSNPLFQEFRLWQFIQNLRIYQREKEIDGKLLTDIDITSECLKSEEDYVRLFDWLNDRETIEQEDLLKHLFNTKKSKNKENPYRWNYVEDKVYPCNETRATILKGFSKCGINASVLSPELEMALWHILYSVEDKKEIETALTHFAQKQGWNDDFAKVFSKAKPFKKDYGSYSEKAIKKLLSLMRMGKYWNQDNIDKNTLDRIDKIINGEYDEKISNRVRDNAINLKDISDFRGLPVWLACYIVYDRHSEAKDCTKWNSPEEIDSYLKKFKQHSLRNPIVEQVVTETLRTVRDIWIQEEQIDEIHLELGRDLKNPADKRKKMSENILKNENTNLRIKAMLMEFMNPSMGIENVRPYSPSQQDILRIYEENALDNLTKDDKDFDFISKISKQAQPSKTDIIRYKCWLEQKYRSPYTGKTISLSKLFTPAYEIEHVIPQSLYFDDSFSNKVICEAEVNKLKDRQLGYKFIAEHHGEKVQLSQGEVVEILSVDAYEKFVKENYANNRIKMKKLLMESIPDEFIERQLNDSRYISKVVKGLLSNIVREKIDDENYEPEAVSKNLISCNGAITDRLKKDWGMNDVWNSIILPRFIRMNQITGKDCFTTTNAEGHLIPQMPLELQKGFNKKRIDHRHHAMDAIVIACTTRDHVNLLNNEAAHSKFNATRYQLQRKLRRFEKAVIDGKEREVAKEFLKPWDSFSSDSKNILENIIVSFKQNQRVINKTTNAFLHFDENGKKTFIKQGKGDSWAIRKSMHKDTVFGEINLRKVRSVSLNEAIKVPERVLNKKIKEKILELKNNKIDAKNIKKYIEENHTGGYGIDSSKIDVFYFTKETKERFFATRKTLDTSFNQAKIKDSIADSGIQKILLAHLKSKNGDAEQAFSPDGIDEMNKNIVELNNGKFHQPILKVRVYEKADKFAVGQKGNKKVKFVEAAKGTNLFFAIFEKDGKRSYLTIPLNVMIDCQKQYGNQWKNNIEAYLKEKELVEKDVKLQFILSPNDLVYLPTEGSIDKKRIYKVVSFTNNRLYAIPYAIAKSIVDKNEFTQLNKIEFTDNKESIKDACVPVIIDRLGNVIEFNGKRL

SEQ ID NO: 127 - protein, 1259 aa, Streptobacillus moniliformis
MKYILGLDLGVASIGWAVTEINEKGEPVGLIDANSVIFKPLDNDKGKLYNVERRDKRGSRRILRRKKHRVERTKMLLVNSSFLTNEEIDNLYVGKLDNIYEVRLKGLKEQLSKNEIARLMIYYCKNRGFKSNRKTEDLEILKSLGEKISEKDSDEKKLKPIIAKNTELIESKGLTPIEVIYMIRENDNSILGFKNKEGNYKFGFKRNQVIDEVRKILGTQQILSKEIVDEYIDILSSQRDFSDGPGGDSKYKIDYTKLAGKCKYTGEVRAVKSAPSYEIFTMLQKLNDIRYVKFTSEDKIEKKKLSKEVIHKLYDLVVEKNKTLTYDLIEKSIDEENIKLLNIPKLSKSKYVELRKSYFKERNDNENLTEEEINAFNEKLNNERMKQELIRNNLKAYKELKSKFKKNNIDENRIKELGGIYFLDLVAELLTYSKTDEKLEYFVENVERYSLFKEQRDIVEIIKTFPNYTKNGNLSLSLVRELNKLLMEGHDYESSLSSLNYYIDTDVDWEKFPTISEIEDSLSTKITNPNVKHILVILRKLYNTLLFKYGRPEKVHLELSRDFSNDFSTRNKIQKEQLENKVRREVAAFEMYGANKDIVAGKDRLSNDDFVRIKLWEEQNKVCMYSGRTIEKYQLTSAEVQIDHILPYSKSFDNSYSNKVLVFSNENQDKKERTPYQWLKGTEKWNEFKQRVRLNLNISNKKKENLLFEDEVVNNEFLERELHATSYSSRLALNIFQRLIPVSDEDKYDEHGNEKVKYLYNRNVIAFQGKMTSMLRNLYSLNKYTHSFESDTLDIDNKAFILKEFEINKDNLKMTAYNVNTGLEITSETKVEKNKSGEFKTIKDELLKKELDKKENLIEISDYFKDKVLFDLKIVDFEEIDTVEPEIISILYKMITALKEEVYSKNRENHLHHSLDAFLLTIMNRSMQMKLIKYNQLISVLKNKEIEIFNEEKGEYIDSKEFAEELQKQKIIDIDGNERGIKFNVNGKTHRLNLVKPYENFLDDIKNKIFDKRENNKLPYHVVKSKVSGALHAETILGESKGEITKRISVFDINYKNLGKIFDKDGSQKEIYETLVKWLEAKSKDYPKLKNGNIIKKVKIVDGNKDKLIKLGNKRYVEMGRTTVKILVLKKEAEEGLKFASIGRYKYNLLKSEKDVNISIWKDAIHFCKVRYNKLKENGYRLIHELIPGETIELELNKGNISKCLVVGFSGGKIEISSVIGDALDLINDKISTRIKERYYITVSTIKSIKKINKNILGD

SEQ ID NO: 128 - protein, 1091 aa, Mobiluncus mulieris
MDSRKYRVGIDVGTNSVGFAAVEEDDSGSPTRFLNTMVVIHDSGVDPEQKKYAITRLASAGTARRTRRLYRTRRQRLRELDDFISNELGYPLVNLENFADPYEPWKVRADLATTKLPNDELPEAMSIALRHMARHRGWRSPYQRVEALHLHAEISKEFAALKERVVEKTGDVFSDDATPAEVLVDLMGRQKVRGADGVLSGKLRQSDNANELRKIASVQGIDDETLNRIIDRVFSSKSPKGKASERVGMDALPGQGSKPRALKAMPSFQKFRVVSVICNLRIKDSGGDARPLSMEEKEKLIDYLMSSTTDDHVTWTDVADLLHVKRSQLQGTAKEGFDGERPYTRPPVNSTWSKIKDSKIKSLVALWKTGDVDVQSAIVEALSNASVLEDSRPGADIVVAYLESLDDKELESLDKVGLPAGRASYSEDSLERLTERMLRDDCDLFEARKREFNVADDWKPPADPIYAPVGNPGVDRVLKIVNRLLMAAEREWGAPTQINIEHVRSGFSSELMQREFERENERRRAQNEEAVKAILTEKGGNSRVSKYDITRYYAVKRQHCQCLYCGTPITFSDCELDHIVPRKGVGSTNTRVNLAAACRSCNRDKSNLPFAVWAGKASNFDVSIDDAVSRVKQWQRSQNEGVREFRAFQNEVISRLLKTTEDPEIDSRSLESVAWMARELHHRVEYYFQSKGAQTQVSVYRGAVTAQARKSSGLEDKVKMIGGGGKTRLDRRHHAMDAATIALMTPGISTTLSEKNNLRDAQKFTGQSETWKDYCGRTETARKHFAVWKSNMERLTDLFNDKLENDAIPVVQPLRLRLSNSKAHDDGIGKLDSKKLGSVWSLADIDRAATPQIWTALTRCDDFDPTKGLPENANRVIRAQGVKYESEDNIPVFPSNVAAIAVRDGYAEIGSTIHHARIYRIDDGKKTFYSMIRVFAVDLLKHQAEDLFTVKLPPSAISIRTCEDSLRRALSNGTAEYLGWLVPGDEIIVDTSDKAFHTGQIGDLLRNFPVNSFRLTGFPSNSRLRLKPVLLAGEGLRDDAEDSIKKILLGQGWRPAINVLFSKGKPRIVRRNSLGIERPSSNNGLPFSWEA

SEQ ID NO: 129 - protein, 872 aa, Candidatus Parvarchaeum sp.
MLGSSRYLRYNLTSFEGKEPFLIMGYYKEYNKELSSKAQKEFNDQISEFNSYYKLGIDLGDKTGIAIVKGNKIILAKTLIDLHSQKLDKRREARRNRRTRLSRKKRLARLRSWVMRQKVGNQRLPDPYKIMHDNKYWSIYNKSNSANKKNWIDLLIHSNSLSADDFVRGLTIIFRKRGYLAFKYLSRLSDKEFEKYIDNLKPPISKYEYDEDLEELSSRVENGEIEEKKFEGLKNKLDKIDKESKDFQVKQREEVKKELEDLVDLFAKSVDNKIDKARWKRELNNLLDKKVRKIRFDNRFILKCKIKGCNKNTPKKEKVRDFELKMVLNNARSDYQISDEDLNSFRNEVINIFQKKENLKKGELKGVTIEDLRKQLNKTFNKAKIKKGIREQIRSIVFEKISGRSKFCKEHLKEFSEKPAPSDRINYGVNSAREQHDFRVLNFIDKKIFKDKLIDPSKLRYITIESPEPETEKLEKGQISEKSFETLKEKLAKETGGIDIYTGEKLKKDFEIEHIFPRARMGPSIRENEVASNLETNKEKADRTPWEWFGQDEKRWSEFEKRVTSLYSKKKISERKREILLNKSNEYPGLNPTELSRIPSTLSDFVESIRKMFVKYGYEEPQTLVQKGKPIIQVVRGRDTQALRWRWHALDSNIIPEKDRKSSFNHAEDAVIAACMPPYYLRQKIFREEAKIKRKVSNKEKEVTRPDMPTKKIAPNWSEFMKTRNEPVIEVIGKVKPSWKNSIMDQTFYKYLLKPFKDNLIKIPNVKNTYKWIGVNGQTDSLSLPSKVLSISNKKVDSSTVLLVHDKKGGKRNWVPKSIGGLLVYITPKDGPKRIVQVKPATQGLLIYRNEDGRVDAVREFINPVIEMYNNG

SEQ ID NO: 130 - protein, 1229 aa, Pediococcus acidilactici
MGDRKYNLGLDIGTSSIGFAAVDENNQPIRVKGKTAIGVRLFEEGKTAADRRGFRTTRRRLSRRRWRINLLNEIFDAHLAEVDPTFLARLKESNRSNLDPKKSFQGSLLFPERKDYQFYEEYPTIYHLRKALMEKDRKFDIREIYLAVHHIIKYRGNFLNGTPMRSFKVENIELNTLFDQLNQLYAEIVPDNELAFDLAQVADVKDVLSSTTIYKMDKKKQLVKMMLLPASNKALQSENKKIVTQFVNAILNYKFKLDVLLQVETDADWSLKLNDEGADDKLEEFTGDLDENRLEIIDLLQRLHNWFSLNEITKDGNSLSAAMVEKYENHHHHLGLLKKVIENHPDAKKAKALKETYTAYVGKTDDKTQNQDDFYKAVEKNLDDSPDAKGIKRLIQLDQFMPKQRTGQNGAIPHQLHQQELDQIIEKQSKYYPFLAEPNPNVKRRKDAPYKLDELIAFKIPYYVGPLVTPEEQAQNKENVFAWMKRKAAGPITPWNFDEKVDRMESANRFIRRMTTKDTYLFGEDVLPAESMIYQKFVVLNELNNLKINGRHLSLKDKQDVYNDLFKQQKTVSIKALQNYYVTKKKAATAPTVGGLADPKKFLSSLSTYIDFKNMFGERVNDPQFQEDLEQIVEWSTIFEDRGIFKAKLQALGWLSEKQIQQLVAKRYKGWGRLSKKLLTGLKNAEGYSILDEMWRSTENFMQIQSRPEFAALIQQANEKQFEGNDPDNVWENIENILGDAYTSPQNKKAIRQVVKVVQDIEKAVGNPPEKIAIEFTREAAANPQRTQSRLRTLEKLYESAEEVVDAGLTAELAEFKENKHVLSDKYYLYFTQLGRDVYTGDTISLDKLNDYDVDHILPQSFIKDDSLDNRVLTIRAVNNGKSDNVPAKMFGKKMGSFWRHLLDNGMISKRKYNNLITDPDNISKYAQKGFINRQLVETSQVIKLTANILNGIYDKDTEIIEVPAKMNSQMRKMFDLVKVREVNDYHHAFDAYLTIFIGNYLYKCYPKLRPYFVYDNFKKFGNKEDIGHKRFNFLGKIEREKKVVAPETGEILWSNVAPNETIKQIKKVYNYKFMIVSREITTRRAELFNQTVYPKNYRGKLIPIKEDRPTDLYGGYSGNTDAYLAIVALEDKKKGKYFKVVGIPTRAAAKLEKLKQQDSQQYLQALHEVIAPQFTKSTKKGIKKTEFEIVLDKVHYRQLVQDGPVKMMLGSSTYKYNAKQLVLSEKAL

SEQ ID NO: 131 - protein, 1398 aa, Veillonella parvula
METQASNQLISSHLKGYPIKDYFVGLDIGTSSVGWAVTNKAYELLKFRSHKMWGSRLFDEGESAVARRGFRSMRRRLERRKLRLKLLEELFADAMAQVDPTFFMRLRESKYHYEDKTTGHSSKHILFIDKNYNDQDYFKEYPTVYHLRSELMKSGTDDIRKLFLAVHHILKYRGNFLYEGATFDSNASTLDDVIKQALENITFNCFDCNSAISSIGQILMEAGKTKSDKAKAIEHLVDTYIATDTVDTSSKTQKDQVKEDKKRLKAFANLVLGLNASLIDLFGSVEELEEDLKKLQITGDTYDDKRDELAKAWSDEIYIIDDCKSVYDAIILLSIKEPGLTISESKVKAFNKHKDDLAILKSLLKSDRSIYNTMFKVDEKGLHNYVHYIKQGRTEETSCNREDFYKYTKKIVEGLSDSKDKEYILSQIELQILLPLQRIKDNGVIPYQLHLEELKAILAKCGPKFPFLNEVADGFSVAEKLIKMLEFRIPYYVGPLNTHHNVDNGGFAWAVRKASGRVTPWNFDDKIDREKSAAAFIKNLTNKCTYLLGEDVLPKSSLLYSEFMLLNELNNVRIDGKPLEKVVKEHLIEAVFKQDHKKMTKNRIEQFLKDNGYISETHKHEITGLDGEIKNDLASYRDMVRILGDGFDRSMAEEIITDITIFGESKKMLRETLRKKFASCLDDEAIKKLTKLRYRDWGRLSQKLLNGIEGCDKAGDGTPETIIILMRNFSYNLMELLGDKFSFMERIQEINAKLTEGQIVNPHDIIDDLALSPAVKRAVWQALRIVDEVAHIKKALPARIFVEVTRSNKNEKKKKDSRQKRLSDLYAAIKKDDVLLNGLNNEIFGELKSSLAKYDDAALRSKKLYLYYTQMGRCAYTGEIIELSLLNTDNYDIDHIYPRSLTKDDSFDNLVLCKRTANAQKSDAYPISEEIQKTQKPFWTFLKQQGLISERKYERLTRITPLTADDLSGFIARQLVETNQSVKAATTLLRRLYPGVDVVFVKAENVTDFRHDNNFIKVRSLNHHHHAKDAYLNIVVGNVYHERFTRNFRAFFKKNGANRTYNLAKMFNYDVNCTNAKDGKAWDVKTSMDTVKKMMDSNDVRVTKRLLEQTGALADATIYKATVAGKAKDGAYIGMKTKSSVFADVSKYGGMTKIKNAYSIIVQYTGKKGEVIKEIVPLPIYLTNRNTTDQDLINYVASIIPQAKDISIIYGKLCINQLVKVNGFYYYLGGKTNSKFCIDNAIQVIVSNEWIPYLKVLEKFNNMRKDNKDLKANVVSTRALDNKHTIEVRIVEEKNIEFFDYLVSKLKMPIYQKMKGNKAAELSEKGYGLFKKMSLEEQSIHLIELLNLLTNQKTTFEVKPLGITASRSTVGSKISNQDEFKVINESITGLYSNEVTIV

SEQ ID NO: 132 - protein, 1485 aa, Prevotella bivia
MKNILGLDLGTNSIGWAKISIDDNGKYIKDSIKLGSRIIPMSQDVLSNFSKGVTLSQTSERTSFRGARRLRERTLLRRERLHRILHLLGFLPKHYEKAIGWDRNDNKTYGKFINHAEPKLAWCKDNNGKMRFLFMDSFHDMLSEFSEKHPELLANGKKIPLDWTIYYLRKKALYKAITKEELAWILLNFNQKRGYYQLRGEEDRDSEANKKEYLELKVIGVEATGEKKGNDIWYNIHLENGWIYRRSSKNPLNDWLGKVKSFIVTTDLDADGNPKKDKDGNIKRSFRAPSEGDWTLIKKRTESLLENSGQTVGQFIYNHILEEPSAKIRGNFIRTIERKYYKDELKAILEKQKEFHHELSSESLLTECAKELYKRNIAHQEVLLKKGIIHLLLNDILFYQRPLKIKKSLIDNCPYENYKYVDKKSGDIKVKSIKCIAKSNPFFQEFRLWQFVSNLRLYRKSDDKDVTSEHLVTTDDYANLFTYLNNRKDIKQSVLLKEYFKIKKVKTINGAEYPVRWNYIDDDNKTYPCNETRYDILHALSKTELKSEWLTPERTYRLWHLLYSIESKEETKKALNKLNLSDDFTEAFLTIKPFKKEYGSYSEKAIKKLLSLMRMGYLWSEDEAIKQVGAEIEKTIEGELPDYVLQRLEKSQHNYNKISDFSGLPLWLASYIIYGRHSEAKEIIHWDNPESMMAYIKDFRQHSMRNPIVEQCVLETLRTVHDIWKEIGHIDEIHIELGREMKSTSEQRKAITQNVLHNQNTNIRIKLLLQELKNDNNITGVRPYSPMQQEILRIYEEGALQGLTKEDKDYNDILKISQTAQPTSNELTRYKLWLEQKYRSPYTGKAISLSKLFTSAYQIEHVIPQSRYFDDSLSNKVICESEVNTLKKAMLGMEFIKTCGGQKVHCTLLGDVEIYNEEDYKAFVNEHYSNNRTKRNKLLMEDIPQEFINRQLNDSRYISKMVKQLLSAIVRGQEEVEATSKFVIPCTGGITDRLKKDWGLNDIWNNLVSPRFQRMNALTGSEYFGHWENKEGKRVFQTTMPIQLQQGFSKKRIDHRHHAMDALVIACASRNIISYLNNETAQDTERRRDLRQKLCDKGGSVRKPWDSFTQDTQYALKDIIVTFKNYVRIINKATNYYEHYKTDGKKGMISQKGDELWAIRKPMHKETVFGKVNLRRPKRVSLSKAIDSVDIICNRKLKKYIKARLNEGLQKKQILNIFKELNNVWEGIDVNKIDIWEMSNDKEPMVATRKQLDTSFDEKKIRSISDTGIQKILLNYLITKNNNPELAFTPEGIQEMNSNISEYNDHKKHQPIYKVRVTEPLGAKYPIGTMGNNPKKFVEAQAGTNLYFAIYEDKEGKRNYDTIPLNIAAERLNQQLSPVPETNENNTPLKFYLSPNDLVYVPSEEERHSGNNIQLDKNRIYKMVSSTSKRCFFIHHRVAISLVDKKEFSAQNKMERSIDNEQVMIKSVCWKLITDRLGNIIKVIK

SEQ ID NO: 133 - protein, 1218 aa, Prevotella buccalis
MNKRILGLDTGTNSLGWAVVDWDEHAQSYELIKYGDVIFQEGVKIEKGIESSKAAERSGYKAIRKQYFRRRLRKIQVLKVLVKYHLCPYLSDDDLRQWHLQKQYPKSDELMLWQRTSDEEGKNPYYDRHRCLHEKLDLTVEADRYTLGRALYHLTQRRGFLSNRLDTSADNKEDGVVKSGISQLSTEMEEAGCEYLGDYFYKLYHEQGNKVRIRQRYTDRKKHYQHEFDAICEKQELSSELIEDLQRAIFFQLPLKSQRHGVGRCTFERGKPRCADSHPDYEEFRMLCFVNNIQVKGPHDLELRPLTYEEREKIEHLFFRKSKPNFDFEDIAKELAGKKNYAWIHDKEERAYKFNYRMTQGVPGCPTTAQLKSIFGDDWKTGIAETYTLIQKKNGSKSLQEMVDDVWNVLYSFSSVEKLKEFAHHKLQLDEENAEKFAKIKLSHSFAALSLKAIRKFLPFLRKGMYYTHASFFANIPTIVGKEIWNNEQSRKYIMENVGELVFNYQPKHRDVQGTIEMLIKDFLANNFELPAGATDKLYHPSMIETYPHALRNEFGILQLGSPRTNAIRNPMAMRSLHVLRRVVNQLLKESIIDENTEVHVEYARELNDANKRRAIADRQKEQDKQHKKYGDEIRKLYKEETGKDIEPTQTDVLKFQLWEEQNHYCLYTGEQIGITDFIGSNPKFDIEHTIPQSVGGDSTQMNLTLCDNRFNREVKKAKLPTELANHEEILTRIEPWKNKYEQLVKERDKQRTFAGMDKAVKDIRIQKRHKLQMEIDYWRGKYERFTMTEVPEGFSRRQGTGIGLISRYAGLYLKSLFHQADSRNKSNVYVVKGVATAEFRKMWGLQSEYEKKCRDNHSHHCMDAITIACIGKREYDLMAEYYHMEETFRQGRGSKPKFSKPWATFTEDVLNIYKNLLVVHDTPNNMPKHTKKYVQTSKGKVLAQGDTARGSLHLDTYYGAIERDGEIRYVVRRPLSSFTNPKELENIVDETVKRTIKEAIADKNFKQAIAEPIYMNEDKGILIKKVRCFANSVKQPINIRQHRDLSKKEYKQQYHVMNENNYLLAIYEGLVKNKVVREFEIVSYIEAAKYYKRSQDRNIFSSIVPTHSTKYGLPLKTKLLMGQQVLMFEENPDEIQVDNTKDLVKRLYKVVGIEKDGRIKFKHHQEARKEGLTIYSTPYKNNDDYVPIFRQSIKNINILVDGIDFNIDILGKVTLKE

SEQ ID NO: 134 - protein, 1218 aa, Prevotella timonensis
MNKRILGLDTGTNSLGWAVVDWDEHAQSYELIKYGDVIFQEGVKIEKGIESSKAAERSGYKAIRKQYFRRRLRKIQVLKVLVKYHLCPYLSDDDLRQWHLQKQYPKSDELMLWQRTSDEEGKNPYYDRHRCLHEKLDLTVEADRYTLGRALYHLTQRRGFLSNRLDTSADNKEDGVVKSGISQLSTEMEEAGCEYLGDYFYKLYDAQGNKVRIRQRYTDRNKHYQHEFDAICEKQELSSELIEDLQRAIFFQLPLKSQRHGVGRCTFERGKPRCADSHPDYEEFRMLCFVNNIQVKGPHDLELRPLTYEEREKIEPLFFRKSKPNFDFEDIAKALAGKKNYAWIHDKEERAYKFNYRMTQGVPGCPTIAQLKSIFGDDWKTGIAETYTLIQKKNGSKSLQEMVDDVWNVLYSFSSVEKLKEFAHHKLQLDEESAEKFAKIKLSHSFAALSLKAIRKFLPFLRKGMYYTHASFFANIPTIVGKEIWNKEQNRKYIMENVGELVFNYQPKHREVQGTIEMLIKDFLANNFELPAGATDKLYHPSMIETYPNAQRNEFGILQLGSPRTNAIRNPMAMRSLHILRRVVNQLLKESIIDENTEVHVEYARELNDANKRRAIADRQKEQDKQHKKYGDEIRKLYKEETGKDIEPTQTDVLKFQLWEEQNHHCLYTGEQIGITDFIGSNPKFDIEHTIPQSVGGDSTQMNLTLCDNRFNREVKKAKLPTELANHEEILTRIEPWKNKYEQLVKERDKQRTFAGMDKAVKDIRIQKRHKLQMEIDYWRGKYERFTMTEVPEGFSRRQGTGIGLISRYAGLYLKSLFHQADSRNKSNVYVVKGVATAEFRKMWGLQSEYEKKCRDNHSHHCMDAITIACIGKREYDLMAEYYRMEETFKQGRGSKPKFSKPWATFTEDVLNIYKNLLVVHDTPNNMPKHTKKYVQTSIGKVLAQGDTARGSLHLDTYYGAIERDGEIRYVVRRPLSSFTKPEELENIVDETVKRTIKEAIADKNFKQAIAEPIYMNEEKGILIKKVRCFAKSVKQPINIRQHRDLSKKEYKQQYHVMNENNYLLAIYEGLVKNKVVREFEIVSYIEAAKYYKRSQDRNIFSSIVPTHSTKYGLPLKTKLLMGQLVLMFEENPDEIQVDNTKDLVKRLYKVVGIEKDGRIKFKYHQEARKEGLPIFSTPYKNNDDYAPIFRQSINNINILVDGIDFTIDILGKVTLKE

SEQ ID NO: 135 - protein, 1487 aa, Prevotella timonensis
MKNILGLDLGSNSVGWALVKVEENGNPIGSIKMGSRIIPMSQDILGSFEKGDTVSQTAQRTLYRGKRRLIERHVLRRERLCRVLHIMNFLPAHFDRLLGWDKTDNKTYGKFIDDSEPKLAWRQNKNEMGKMEFVFMDSFHEMLSDFAKHQPQLIANGKKVPLDWTIYYLRKKALTQLISKEELAWILLNFNKKRGYYQLRGEEEEEQPTKKEEYKVLKVISVDADEGQKGNGIWYNIHLEDGGIYKKKSDIPLYDWVGKTLQLIVVTTYEKDGKTPKIFDSGKQNPSYRLPKEDDWGLVKKRTESQLQSSGKTVGAFIYDNILSKPDDKIRGNLVRTIERKYYKKELIEILQQQAKYHDELHNQNLLESCAKELYAHNDVHYNEVIKSNMINLLVNDIIFYQRPLKSKKSLIANCKYESYEYVDKETGEIKEMPIKCIAKSNPYYQEFRLWQFIHNLRLSDVVTREDVTAQYLSTPQDYCNLFTYLNDRKEIKQDILLKDFFKIKKVQIDKEKVFPIEWNYIKDATKSYPCNETRYELLSALKRAGMDKQWLDDTPNMQYRLWHLLYSVEEKEESAKALRKLYDDDKFVTSFLKIKPFNKCYGAYSEKAIKRLLTLMRMGKAWNEQAIDAKTLKCIQQIITDNVDSKLKEKIDDSRYVLHHVSDFQGLPTYLASYVIYGRHSEVTDIQCWDSPEDLLKFIRDFKQHSLRNPIVEQVILETLRVVYDIWKAEKHIDEIHVEVAREMKLTAQQRNEANLRNLNNEATNLRIKYLLEELKNDTFIKDVRPLSPIHQEKMRIYEQAVLGNLNKQDKDYDDIIKISKKEHPTNAELIRYKLWLEQRYCSPYTGKAISLSKLFTTAYEIEHIIPQSRYFDNSFNNKVICEAEVNKAKGNMLGYEFIKKQGGQKIYCTQLGKAVTILKEEAYKQFVNEHYAHNKRKRDNLLAENIPESFSSRQLNDTRYITKTIMSLLSNVVRQQSEEEATAKNLLPSSGSVTDRLKNDWGLKDVWNTIVTPRFERLNKLSGTNDFGEMKEENGNRYFQTNVPLEYEKGFKKKRIDHRHHAMDALVIACTTRNMVNYISNANANSPKQREDLRQLLCDKNRIINKPWDTFTQDALKALNDIVVSFKNNVRIINRATNRYQRYDKNGKKIIFSQKGDDMWAIRKSMHKETVFGRVNLIRKEVLPIAKALDNISAICNAQLRAYVNDLVDKHFNKKQLVAHFKSLNYKWNRQDVSKVEVWISSDNKTPMVAVRKPLDTSFDKKKIASITDTGIQTILLNYLESKGGDASVAFAPEGIQEMNSNIELYNNGKAHKPIKNVRLSEPLGAKYQVGERGAKTKKYVEADKGTNLFFAIYEDEEGKRYYYSVPLREAIERQKQKLSPVPEYNEKGVALKFYLSPNDLVYVPTEEERTMGTCHIDKARIYKMVSSTGCSCYFVPSTFAKVIVDKVELQSLNKMEKAITDECIKEVCWKLKVDRLGNIINVIK

SEQ ID NO: 136 - protein, 1138 aa, Bifidobacterium dentium
MLCRCHRRYRIGIDVGLMSVGLAAIEVDETGFPIRILNIQSVIHDGGIDPQLGKKKSISRKAISGVARRTRRMRRRKVVRLRQLDATLESLGFPIVEPDSLDTWEIWLTRAKLASSYIQDDETRKEDVSIALRHIARHRGWRNPYSNVESLFVDVAPSEQYEELRRKAEEKLGTSLSGNPTSAEIVECILKRQVGEVQLRTRSRKGVNGNAVEKEGLLPTKLMQSDNAAEIRRIFKVQRIDDETGRKLLRAVFKACSPKGSVERRVGRDALAPGLPRALKASLAFQEYRIANVLTNLVISEDGTKRKLTIAEKQRVFGFLSSNETDDITWIDVAEKLGLERRQIQGVGCLTADGEERISSTPPRNITALHIHSAKPVIREKLVAWWKAASPTVRETMVELLSNTVDIDRVREDMDYSSAVAFIDSLGDEELTALDSVDLLSGRAAYSRQTLKQLTERMLNTDDDLHEARKAVFGVDDNWKPPVDAISTSVGNPAVDRVLKIVNRYLLACQKRWRNPQSVQIEHVRESFSSVAKAKETERVQGERARYRNDLRRELCEQEGLNKIRESDIRRWESVQRQNGTCLYCGSPITFRTCEMDHIVPRKGVGSTNTRVNLAAACAACNKLKSNTAFSVWARTEGAANRKVSQRDAIERVKTFIFNKSVPPREQRAFKQAVISRLRQAESDPAIDNRSIESVAWMADELHRRIEAYFNQDADVSGNTPATQVWVFQGRVTALARKASGIEGRIHFAGEWKKTRLDRRHHAVDAAVIAMMNHSAAQTLVERDSLRLSQWITRKPETWKNYPFSEGQKKTRFKEWLDCMNALLDLLNDALDSDRVPVTRCQRMSLGNSQAHAATIRKMKRVELFSPMDADLIRRASTPALYCALTRLPEYSPEKGLPENRGREIVLNGRHIRSTETVDFFASGAAQLMVRNGSAEIGDSIHHMRIYRYRKTGAKSQEYVYGMIRVFQIDLLHASSENLFAVQLPSQSVSVRYGDKNVVQAIQEGRAEYLGHIVPNDEILISYEGVRMKDSEKIGAYANDFSGTASELAQRRHWVVVGSDVSKLALRPSYLSEEGLENSGSESERLSKQTRKVIEGKGWVVAVNILAKYHPVVIRRNALGEPRFRTNSGMPVSWRWDR

SEQ ID NO: 137 - protein, 587 aa, Neisseria subflava
MATSRSRIRSQTDAFGVVGSLVAFNQTSRLFVAKKNEGETADKELGALLKGVADNAHALQTGNFRTPAELALNKFEKESGHIRNQRGDYSHTFNRKDLQAELNLLFEKQKEFGNPHVSDGLKEGIETLLMAQRPALSGDAVQKMLGYCTFEPTEPKAAKNTYTAGRFIWLTKLNNLRILEQGSERPLTTTERATLMDEPYRKSKLTYAQARKLLGLEDTAFFKGLRYGKDNAEASTLMEMKAYHAISRALEKEGLKDKKSPLNLSPELQDEIGTAFSLFKTDEDITGRLKDRVQPEILEALLKHISFDKFVQISLKALRRIVPLMEQGKRYDEACAEIYGDHYGKKNAEEKIYLPPIPADEIRNPVVLRALSQARKVINAVVRRYGSPARIHIETAREVGKSFKDRKEIEKRQEENRKDREKAAAKFREYFPNFVGEPKSKDILKLRLYEQQHGKCLYSGKEINLGRLNEKGYIEIDHALPFSRTWDDSFNNKVLVLGSENQNKGNQTPYEYFNGKDNSREWQEFKARVETSRFPRSKKQRILLQKFDEDGIYRIGVKTALSFPKYQIDELGKEIRPCRLKKRPPVR

SEQ ID NO: 138 - protein, 1269 aa, Mycoplasma gallisepticum
MNNSIKSKPEVTIGLDLGVGSVGWAIVDNETNIIHHLGSRLFSQAKTAEDRRSFRGVRRLIRRRKYKLKRFVNLIWKYNSYFGFKNKEDILNNYQEQQKLHNTVLNLKSEALNAKIDPKALSWILHDYLKNRGHFYEDNRDFNVYPTKELAKYFDKYGYYKGIIDSKEDNDNKLEEELTKYKFSNKHWLEEVKKVLSNQTGLPEKFKEEYESLFSYVRNYSEGPGSINSVSPYGIYHLDEKEGKVVQKYNNIWDKTIGKCNIFPDEYRAPKNSPIAMIFNEINELSTIRSYSIYLTGWFINQEFKKAYLNKLLDLLIKTNGEKPIDARQFKKLREETIAESIGKETLKDVENEEKLEKEDHKWKLKGLKLNTNGKIQYNDLSSLAKFVHKLKQHLKLDFLLEDQYATLDKINFLQSLFVYLGKHLRYSNRVDSANLKEFSDSNKLFERILQKQKDGLFKLFEQTDKDDEKILAQTHSLSTKAMLLAITRMTNLDNDEDNQKNNDKGWNFEAIKNFDQKFIDITKKNNNLSLKQNKRYLDDRFINDAILSPGVKRILREATKVFNAILKQFSEEYDVTKVVIELARELSEEKELENTKNYKKLIKKNGDKISEGLKALGISEDEIKDILKSPTKSYKFLLWLQQDHIDPYSLKEIAFDDIFTKTEKFEIDHIIPYSISFDDSSSNKLLVLAESNQAKSNQTPYEFISSGNAGIKWEDYEAYCRKFKDGDSSLLDSTQRSKKFAKMMKTDTSSKYDIGFLARNLNDTRYATIVFRDALEDYANNHLVEDKPMFKVVCINGSVTSFLRKNFDDSSYAKKDRDKNIHHAVDASIISIFSNETKTLFNQLTQFADYKLFKNTDGSWKKIDPKTGVVTEVTDENWKQIRVRNQVSEIAKVIEKYIQDSNIERKARYSRKIENKTNISLFNDTVYSAKKVGYEDQIKRKNLKTLDIHESAKENKNSKVKRQFVYRKLVNVSLLNNDKLADLFAEKEDILMYRANPWVINLAEQIFNEYTENKKIKSQNVFEKYMLDLTKEFPEKFSEFLVKSMLRNKTAIIYDDKKNIVHRIKRLKMLSSELKENKLSNVIIRSKNQSGTKLSYQDTINSLALMIMRSIDPTAKKQYIRVPLNTLNLHLGDHDFDLHNMDAYLKKPKFVKYLKANEIGDEYKPWRVLTSGTLLIHKKDKKLMYISSFQNLNDVIEIKNLIETEYKENDDSDSKKKKKANRFLMTLSTILNDYILLDAKDNFDILGLSKNRIDEILNSKLGLDKIVK

SEQ ID NO: 139 - protein, 1354 aa, Prevotella melaninogenica
MADFAKYQPGMVADGRKIPLDWTLYYLRKKALTQAIRKEELAWILLNFNQKRGYYQLRGEEEEENSTKHEEYYELKVVSVEAAEEGKGGNTWYNVTLENGWIYRRQSKIELNDWVGKVRPFIVTTEYEIDGVTIKKDKNGEVKRSFRAPSENDWGLRKKRTESLLEESGKTVGAFIYNHILSEPADKIRGNFIRTIERKFYKKELEAILREQSKHQKELKDIDTLIACIKELYPNNKPHQDSLIKKDMTYLLITDLIFYQRPLKSKKSLIADCPYEYYEYVIKETGENKRQSIKCIAKSNPYYQEFRLWQFIINLRLFDRNNDKEVTSEYLSSMEDYTRLFTYLNDRKDINQETLLKDFFKQKKVKRGMEKEFPIRWNYIEDKEKKYPCNETRHELLTALGKVGIDHSWLDDKELFYRLWHLLYSVESKEEAEGALRKLVDNDDFVNAFLKIKPFKKEYGAYSEKAIKKLLAVMRMGNLWNEVDICEQTRDRIQNIIKGDIDEKIKDRMGRTFSQLSDFQGLPEWLACYVVYGQHSEATDIQRWTKPENLMAYINGFKQHSLRNPIVEQCILETLRTVHDIWKEAGHIDEIHIELGRGMKSTADQRARMSKSIMQNENTNLRIKSLLMELKNAKEFENVRPYSPMQQEILRIYEEGALQELTKEDAQYNEISKISQMAQPSANELLKYRLWLEQKYCSPYTGKPISLSKLFTSAYQIEHIIPQSRYFDDSFTNKVICEAEVNQLKSNMLGYEFIKKHGGEIVRCTMIGDVKLLDAKEYYNFVTEHYTNNRRKKEKLLMEDIPQEFLNRQMNDSRYISKKVMAILSNIVREEDEQEAKSKFVIACSGGITDRLKQDWGLNDVWNSIVYPRFERLNKLTNTENFGRWENKKGKQVFQTSVPLELQKDFSKKRIDHRHHAMDALVIACASNNIINYLNNESAKSQEKREDLRKKLCDKNRIIRKPWETFTQDAHTALENVVVSFKNYIRVINKATNYYEKYDKNGKKEIAEQKGQDMWAIRKPMHKETVFGQVNLRRKITIKLKDALEKIPAICDKELRDYINILVAKQFNKKQILAHFKSINYRLNMKSVDKVDVWQFSNEKEPMVATRKSVDTSFDTKRIATITDTGIQKILLNYLKAKNNDPNIAFTPEGIAEMNKHITEYNNGKQHQPILKVRVSEPKGAKYQVGETGNKRSKFVEAQKGTNLYFAIYEDKEGNRSYNTIPLNEVIERLKQGLSPVPDANEKSIPLKFHLSPNDLVYVPKTDEENEIKMGQIYKFVDSSGTTANFVPHRVSNLIYNVDKKIAENFCNHEIIQNEYGIGSPQSKNQKSITGEMIKAVCWKLEVDRLGNIHKIIK

SEQ ID NO: 140 - protein, 1130 aa, Streptococcus gallolyticus
MTNGKILGLDIGIASVGVGIIEAKTGKVVHANSRLFSAANAENNAERRGFRGSRRLNRRKKHRVKRVRDLFEKYEIVTDFRNLNLNPYELRVKGLTEQLTNEELFAALRTISKRRGISYLDDAEDDSTGSTDYAKSIDENRRLLKTKTPGQIQLERLEKYGQLRGNFTVYDENGEAHRLINVFSTSDYEKEARKILETQADYNKKITAEFIDDYVEILTQKRKYYHGPGNEKSRTDYGRFRTDGTTLENIFGILIGKCSFYPDEYRASKASYTAQEYNFLNDLNNLKVPTETGKLSTEQKEALVEFAKSTATLGPAKLLKEIAKILDCKVDEIKGYREDDKGKPDLHTFEPYRKLKFNLDSVNIDDLSREVLDKLADILTLNTEREGIEDAIRHNLPNQFTEGQISEIIKVRKSQSTAFNKGWHSFSAKLMNELIPELYATSDEQMTILTRLEKFKVNKKSSKNTKTIDEKEVTDEIYNPVVAKSVRQTIKIINAAVKKYGDFDKIVIEMPRDKNADDEKKFIDKRNKENKKEKDDALKRAAYLYNGTDKLPDEVFHGNKQLETKIRLWYQQGERCLYSGKPIPIQELVHNSNNFEIDHILPLSLSFDDSLANKVLVYAWTNQEKGQKTPYQVIDSMDAAWSFREMKDYVLKQKGLGKKKRDYLLTTENIDKIEVKKKFIERNLVDTRYASRVVLNSLQSALRELGKDTKISVIRGQFTSQLRRKWKIDKSRETYHHHAVDALIIAASSQLKLWEKQDNPMFVDYGNNQVVDKQTGEILSVSDDEYKELVFQPPYQGFVNMISSKGFEDEILFSYQVDSKYNRKVSDATIYSTRKAKIGKDKKEETYVLGKIKDIYSQNGFDTFIKKYNKDKTQFLMYQKDPLTWENVIEVILRDYPTTKKSEDGKNDVKCNPFEEYRRENGLVCKYSKKGKGTPIKSLKYYDKKLGNCIDITPEGSKNEVVLQSLNPWRADVYFNPETLKYELLGLKYSDLSFEKGTGKYHISQEKYDVIKEKEGIGKKSEFKFTLYRNDLILIKDTASGEQEIYRFLSRTMPNVKHYAELKPYDKEKFDNVQELVEALGEADKVGRCIKGLNKSNLSIYKVRTDVLGNKYFVKKEGDKPKLDFKNNKK

SEQ ID NO: 141 - protein, 1371 aa, Streptococcus gallolyticus
MTEKNYSIGLDIGTNSVGWAVITDDYKVPAKKMKVLGNTDKKYIKKNLLGALLFDNGETAEATRLKRTARRRYTRRKNRLRYLQEIFAEEMAKVDESFFYRLDESFLTTDDKDFERHPIFGNKADEIKYHQEFPTIYHLRKHLADSHEKADLRLIYLALAHMIKFRGHFLIEGELNAENTDVQKLFEAFVEVYDRTFDDSNLSEITVDASSILTEKFSKSRRLENLIKHYPTEKKNTLFGNLVALALGLQPNFKTSFKLSEDAKLQFSKDTYEEDLEELIGKIGDEYADLFTSAKNLYDAILLSGILTVADNTTKAPLSASMIKRYNEHQVDLKKLKEFIKNNASDKYDEIFNDKDKNGYAGYIENGVKQDEFYKYLKTTLSKIDGSDYFLDKIEREDFLRKQRTFDNGSIPHQIHLQEMHAILRRQGEHYAFLKENQAKIEKILTFRIPYYVGPLARKNSRFAWAEYHSDEKITPWNFDEIIDKEKSAEKFITRMTLNDLYLPEEKVLPKHSLVYETYTVYNELTKVKYVNEQGKSNFFDANMKQEIFEHVFKENRKVTKDKFLNYLNKEFPEYRIQDLIGLDKENKSFNASLGTYHDLKKILDKSFLDDKTNETIIEDIIQTLTLFEDRDMIRQRLQKYSDIFTPQQLKKLERRHYTGWGRLSYKLINGIRNKENGKSILDYLIDDGYANRNFMQLISDDTLPFKQIIKDAQIIGDIDDVTSVVRELPGSPAIKKGILQSVKIVDELVKVMGHNPDNIVIEMARENQTTNRGRNQSQQRLKKLQDSLKELGSNILNEEKPSYIEGKVENNHLQDDRLFLYYIQNGKDMYTGDELDIDHLSDYDIDHIIPQAFIKDDSIDNRVLTSSAKNRGKSDDVPSLDIVHDRKADWIRLYKSGLISKRKFDNLTKAERGGLTENDKAGFIKRQLVETRQITKHVAQILDSRFNTERDENDKVIRNVKVITLKSNLVSQFRKDFKFYKVREINDYHHAHDAYLNAVVGTALLKKYPKLAPEFVYGEYKKYDIRKFITSSGDKATAKYFFYSNLMNFFKRVIRYSNGKVVVRPVIECSKDTGEIAWNKQTDFEKVRRVLSYPQVNIVKKVETQTGGFSKESILPKGNSDKLIPRKTKKFRWDTPKYGGFDSPNIAYSVFVIADVEKGKAKKLKTVKELVGISIMERSSFEENPVVFLEKKGYQNVQEDNLIKLPKYSLFEFEGGRRRLLASASELQKGNEVVLSRHLVELLYHAHRVNSFNNSEHLKYVSEHKKEFGEVLSCVENFAKSYVDVEKNLGKIRAVADKIDTFSIEDISISFVNLLTLTALGAPADFNFLGEKIPRKRYTSTKECLNATLIHQSITGLYETRIDLSKLGEE

SEQ ID NO: 142 - protein, 1168 aa, Azospirillum sp.
MARPAFRAPRREHVNGWTPDPHRISKPFFILVSWHLLSRVVIDSSSGCFPGTSRDHTDKFAEWECAVQPYRLSFDLGTNSIGWGLLNLDRQGKPREIRALGSRIFSDGRDPQDKASLAVARRLARQMRRRRDRYLTRRTRLMGALVRFGLMPADPAARKRLEVAVDPYLARERATRERLEPFEIGRALFHLNQRRGYKPVRTATKPDEEAGKVKEAVERLEAAIAAAGAPTLGAWFAWRKTRGETLRARLAGKGKEAAYPFYPARRMLEAEFDTLWAEQARHHPDLLTAEAREILRHRIFHQRPLKPPPVGRCTLYPDDGRAPRALPSAQRLRLFQELASLRVIHLDLSERPLTPAERDRIVAFVQGRPPKAGRKPGKVQKSVPFEKLRGLLELPPGTGFSLESDKRPELLGDETGARIAPAFGPGWTALPLEEQDALVELLLTEAEPERAIAALTARWALDEATAAKLAGATLPDFHGRYGRRAVAELLPVLERETRGDPDGRVRPIRLDEAVKLLRGGKDHSDFSREGALLDALPYYGAVLERHVAFGTGNPADPEEKRVGRVANPTVHIALNQLRHLVNAILARHGRPEEIVIELARDLKRSAEDRRREDKRQADNQKRNEERKRLILSLGERPTPRNLLKLRLWEEQGPVENRRCPYSGETISMRMLLSEQVDIDHILPFSVSLDDSAANKVVCLREANRIKRNRSPWEAFGHDSERWAGILARAEALPKNKRWRFAPDALEKLEGEGGLRARHLNDTRHLSRLAVEYLRCVCPKVRVSPGRLTALLRRRWGIDAILAEADGPPPEVPAETLDPSPAEKNRADHRHHALDAVVIGCIDRSMVQRVQLAAASAEREAAAREDNIRRVLEGFKEEPWDGFRAELERRARTIVVSHRPEHGIGGALHKETAYGPVDPPEEGFNLVVRKPIDGLSKDEINSVRDPRLRRALIDRLAIRRRDANDPATALAKAAEDLAAQPASRGIRRVRVLKKESNPIRVEHGGNPSGPRSGGPFHKLLLAGEVHHVDVALRADGRRWVGHWVTLFEAHGGRGADGAAAPPRLGDGERFLMRLHKGDCLKLEHKGRVRVMQVVKLEPSSNSVVVVEPHQVKTDRSKHVKISCDQLRARGARRVTVDPLGRVRVHAPGARVGIGGDAGRTAMEPAEDIS

SEQ ID NO: 143 - protein, 1345 aa, Streptococcus mutans
MKKPYSIGLDIGTNSVGWAVVTDDYKVPAKKMKVLGNTDKSHIKKNLLGALLFDSGNTAADRRLKRTARRRYTRRRNRILYLQEIFAEEMSKVDDSFFHRLEDSFLVTEDKRGERHPIFGNLEEEVKYHENFPTIYHLRQYLADNPEKVDLRLVYLALAHIIKFRGHFLIEGKFDTRNNDVQRLFQEFLAVYDNTFENSSLQEQNVQVEEILTDKISKSAKKDRVLKLFPNEKSNGRFAEFLKLIVGNQADFKKHFELEEKAPLQFSKDTYEEELEVLLAQIGDNYAELFLSAKKLYDSILLSGILTVTDVSTKAPLSASMIQRYNEHQMDLAQLKQFIRQKLSDKYNEVFSDVSKDGYAGYIDGKTNQEAFYKYLKGLLNKIEGSGYFLDKIEREDFLRKQRTFDNGSIPHQIHLQEMRAIIRRQAEFYPFLADNQDRIEKILTFRIPYYVGPLARGKSDFAWLSRKSADKITPWNFDEIVDKESSAEAFINRMTNYDLYLPNQKVLPKHSLLYEKFTVYNELTKVKYKTEQGKTAFFDANMKQEIFDGVFKVYRKVTKDKLMDFLEKEFDEFRIVDLTGLDKENKAFNASYGTYHDLRKILDKDFLDNSKNEKILEDIVLTLTLFEDREMIRKRLENYSDLLTKEQVKKLERRHYTGWGRLSAELIHGIRNKESRKTILDYLIDDGNSNRNFMQLINDDALSFKEEIAKAQVIGETDNLNQVVSDIAGSPAIKKGILQSLKIVDELVKIMGHQPENIVVEMARENQFTNQGRRNSQQRLKGLTDSIKEFGSQILKEHPVKHSQLQNDRLFLYYLQNGRDMYTGEELDIDYLSQYDIDHIIPQAFIKDNSIDNRVLTSSKENRGKSDDVPSKNVVRKMKSYWSKLLSAKLITQRKFDNLTKAERGGLTDDDKAGFIKRQLVETRQITKHVARILDERFHTETDENNKKIRQVKIVTLKSNLVSNFRKEFELYKVREINDYHHAHDAYLNAVIGKALLGVYPQLEPEFVYGDYPHFHGHKENKATAKKFFYSNIMNFFKKDDVRTDKNGEIIWKKDEHISNIKKVLSYPQVNIVKKVEEQTGGFSKESILPKGNSDKLIPRKTKKFYWDTKKYGGFDSPIVAYSILVIADIEKGKSKKLKTVKALVGVTIMEKMTFERDPVAFLERKGYRNVQEENIIKLPKYSLFKLENGRKRLLASARELQKGNEIVLPNHLGTLLYHAKNIHKVDEPKHLDYVDKHKDEFKELLDVVSNFSKKYTLAEGNLEKIKELYAQNNGEDLKELASSFINLLTFTAIGAPATFKFFDKNIDRKRYTSTTEILNATLIHQSITGLYETRIDLSKLGGD

SEQ ID NO: 144 - protein, 1024 aa, Helicobacter mustelae
MIRTLGIDIGIASIGWAVIEGEYTDKGLENKEIVASGVRVFTKAENPKNKESLALPRTLARSARRRNARKKGRIQQVKHYLSKALGLDLECFVQGEKLATLFQTSKDFLSPWELRERALYRVLDKEELARVILHIAKRRGYDDITYGVEDNDSGKIKKAIAENSKRIKEEQCKTIGEMMYKLYFQKSLNVRNKKESYNRCVGRSELREELKTIFQIQQELKSPWVNEELIYKLLGNPDAQSKQEREGLIFYQRPLKGFGDKIGKCSHIKKGENSPYRACKHAPSAEEFVALTKSINFLKNLTNRHGLCFSQEDMCVYLGKILQEAQKNEKGLTYSKLKLLLDLPSDFEFLGLDYSGKNPEKAVFLSLPSTFKLNKITQDRKTQDKIANILGANKDWEAILKELESLQLSKEQIQTIKDAKLNFSKHINLSLEALYHLLPLMREGKRYDEGVEILQERGIFSKPQPKNRQLLPPLSELAKEESYFDIPNPVLRRALSEFRKVVNALLEKYGGFHYFHIELTRDVCKAKSARMQLEKINKKNKSENDAASQLLEVLGLPNTYNNRLKCKLWKQQEEYCLYSGEKITIDHLKDQRALQIDHAFPLSRSLDDSQSNKVLCLTSSNQEKSNKTPYEWLGSDEKKWDMYVGRVYSSNFSPSKKRKLTQKNFKERNEEDFLARNLVDTGYIGRVTKEYIKHSLSFLPLPDGKKEHIRIISGSMTSTMRSFWGVQEKNRDHHLHHAQDAIIIACIEPSMIQKYTTYLKDKETHRLKSHQKAQILREGDHKLSLRWPMSNFKDKIQESIQNIIPSHHVSHKVTGELHQETVRTKEFYYQAFGGEEGVKKALKFGKIREINQGIVDNGAMVRVDIFKSKDKGKFYAVPIYTYDFAIGKLPNKAIVQGKKNGIIKDWLEMDENYEFCFSLFKNDCIKIQTKEMQEAVLAIYKSTNSAKATIELEHLSKYALKNEDEEKMFTDTDKEKNKTMTRESCGIQGLKVFQKVKLSVLGEVLEHKPRNRQNIALKTTPKHV

SEQ ID NO: 145 - protein, 765 aa, Butyrivibrio fibrisolvens
MGITIGLDLGVASVGWAVVNDDYEILESCSNIFPSADASKNSERRGFRQGRRLTRRRKNRIHDFQKLWEDKGFVIPSQGTEDVLAIKIKGLSEKLSVDEVYWVLLNSLKHRGISYLDDADSGDNSSDYAKSISRNEEELKEKLPCEIQWERLQKYGAYRGNISIVEDGEPITLRNVFTTSAYKKEVEQFIDTQAKYNAQYSGDFKADYLEIFNRKREYYEGPGNELSRTDYGKYTTEINADGEYITVDNIFDKLVGKCSVNPDERRAAGASYTAQEFNVLNDLNNLTISSESSFIEDGKLTEDAKRKIIETIKNAKTVNVKKIICDVIGDKKCQISGARIDKNEKEIFHSFEAYNKMRRALEEIGFDISSLSRENLDLIGDILTLNTDRESILNAFNRKGIELADEAKDILVKVRKTNGSLFNKWQSFGLSIMNELIPELYAQPKNQMELLTAMGVFKSRGDRFLECKEIPGDLIVDDIYNPVVSKTVRITVRILNALIKKYGYPDRVVIEMPRDKNSDEEQQRLKKEQRDNENEIKDIKARVKTEYGREITEEDFRQHSKLSLKLKLWNEQQGICPYSGKSIKIDDLLDNPNLFEVDHIIPLSISFDDSRNNKVLVYSSENQDKGNRTPLAYLASVNRQWDIHSFMDYVLKTYAGAQKRKKRDNLLNEQDITKVEVLQGFVNRNINDTRYASKVVLNSLQEYFSSKECSTKVKVIRGSFTHQMRVNLKLKKTVMNHMFIMQLMQCLLLFHRWDMTLIMNLQISI

SEQ ID NO: 146 - protein, 1338 aa, Coprococcus catus
MKQEYFLGLDMGTGSLGWAVTDSTYQVMRKHGKALWGTRLFESASTAEERRMFRTARRRLDRRNWRIQVLQEIFSEEISKVDPGFFLRMKESKYYPEDKRDAEGNCPELPYALFVDDNYTDKNYHKDYPTIYHLRKMLMETTEIPDIRLVYLVLHHMMKHRGHFLLSGDISQIKEFKSTFEQLIQNIQDEELEWHISLDDAAIQFVEHVLKDRNLTRSTKKSRLIKQLNAKSACEKAILNLLSGGTVKLSDIFNNKELDESERPKVSFADSGYDDYIGIVEAELAEQYYIIASAKAVYDWSVLVEILGNSVSISEAKIKVYQKHQADLKTLKKIVRQYMTKEDYKRVFVDTEEKLNNYSAYIGMTKKNGKKVDLKSKQCTQADFYDFLKKNVIKVIDHKEITQEIESEIEKENFLPKQVTKDNGVIPYQVHDYELKKILDNLGTRMPFIKENAEKIQQLFEFRIPYYVGPLNRVDDGKDGKFTWSVRKSDARIYPWNFTEVIDVEASAEKFIRRMTNKCTYLVGEDVLPKDSLVYSKFMVLNELNNLRLNGEKISVELKQRIYEELFCKYRKVTRKKLERYLVIEGIAKKGVEITGIDGDFKASLTAYHDFKERLTDVQLSQRAKEAIVLNVVLFGDDKKLLKQRLSKMYPNLTTGQLKGICSLSYQGWGRLSKTFLEEITVPAPGTGEVWNIMTALWQTNDNLMQLLSRNYGFTNEVEEFNTLKKETDLSYKTVDELYVSPAVKRQIWQTLKVVKEIQKVMGNAPKRVFVEMAREKQEGKRSDSRKKQLVELYRACKNEERDWITELNAQSDQQLRSDKLFLYYIQKGRCMYSGETIQLDELWDNTKYDIDHIYPQSKTMDDSLNNRVLVKKNYNAIKSDTYPLSLDIQKKMMSFWKMLQQQGFITKEKYVRLVRSDELSADELAGFIERQIVETRQSTKAVATILKEALPDTEIVYVKAGNVSNFRQTYELLKVREMNDLHHAKDAYLNIVVGNAYFVKFTKNAAWFIRNNPGRSYNLKRMFEFDIERSGEIAWKAGNKGSIVTVKKVMQKNNILVTRKAYEVKGGLFDQQIMKKGKGQVPIKGNDERLADIEKYGGYNKAAGTYFMLVKSLDKKGKEIRTIEFVPLYLKNQIEINHESAIQYLAQERGLNSPEILLSKIKIDTLFKVDGFKMWLSGRTGNQLIFKGANQLILSHQEAAILKGVVKYVNRKNENKDAKLSERDGMTEEKLLQLYDTFLDKLSNTVYSIRLSAQIKTLTEKRAKFIGLSNEDQCIVLNEILHMFQCQSGSANLKLIGGPGSAGILVMNNNITACKQISVINQSPTGIYEKEIDLIKL

SEQ ID NO: 147 - protein, 1035 aa, Candidatus Puniceispirillum sp.
MRRLGLDLGTNSIGWCLLDLGDDGEPVSIFRTGARIFSDGRDPKSLGSLKATRREARLTRRRRDRFIQRQKNLINALVKYGLMPADEIQRQALAYKDPYPIRKKALDEAIDPYEMGRAIFHINQRRGFKSNRKSADNEAGVVKQSIADLEMKLGEAGARTIGEFLADRQATNDTVRARRLSGTNALYEFYPDRYMLEQEFDTLWAKQAAFNPSLYIEAARERLKEIVFFQRKLKPQEVGRCIFLSDEDRISKALPSFQRFRIYQELSNLAWIDHDGVAHRITASLALRDHLFDELEHKKKLTFKAMRAILRKQGVVDYPVGFNLESDNRDHLIGNLTSCIMRDAKKMIGSAWDRLDEEEQDSFILMLQDDQKGDDEVRSILTQQYGLSDDVAEDCLDVRLPDGHGSLSKKAIDRILPVLRDQGLIYYDAVKEAGLGEANLYDPYAALSDKLDYYGKALAGHVMGASGKFEDSDEKRYGTISNPTVHIALNQVRAVVNELIRLHGKPDEVVIEIGRDLPMGADGKRELERFQKEGRAKNERARDELKKLGHIDSRESRQKFQLWEQLAKEPVDRCCPFTGKMMSISDLFSDKVEIEHLLPFSLTLDDSMANKTVCFRQANRDKGNRAPFDAFGNSPAGYDWQEILGRSQNLPYAKRWRFLPDAMKRFEADGGFLERQLNDTRYISRYTTEYISTIIPKNKIWVVTGRLTSLLRGFWGLNSILRGHNTDDGTPAKKSRDDHRHHAIDAIVVGMTSRGLLQKVSKAARRSEDLDLTRLFEGRIDPWDGFRDEVKKHIDAIIVSHRPRKKSQGALHNDTAYGIVEHAENGASTVVHRVPITSLGKQSDIEKVRDPLIKSALLNETAGLSGKSFENAVQKWCADNSIKSLRIVETVSIIPITDKEGVAYKGYKGDGNAYMDIYQDPTSSKWKGEIVSRFDANQKGFIPSWQSQFPTARLIMRLRINDLLKLQDGEIEEIYRVQRLSGSKILMAPHTEANVDARDRDKNDTFKLTSKSPGKLQSASARKVHISPTGLIREG

SEQ ID NO: 148 - protein, 1270 aa, Mycoplasma gallisepticum
MNNSIKSKPEVTIGLDLGVGSVGWAIVDNETNIIHHLGSRLFSQAKTAEDRRSFRGVRRLIRRRKYKLKRFVNLIWKYNSYFGFKNKEDILNNYQEQQKLHNTVLNLKLEALNAKIDPKALSWILHDYLKNRGHFYEDNRDFNVYPTEELANYFDEFGYYKGIIDSKNDDDDKLEEGLTKYKFSNQHWLEEVKKVLSNQTGLPEKFKEEYESLFSYVRNYSEGPGSINSVSPYGIYHLDEKEGKVVQKYNNIWDKTIGKCSIFPDEYRAPKNSPIAMIFNEINELSTIRSYSIYLTGWFINQEFKKAYLNKLLDLLIKTNSEKPIDARQFKKLREETIAESIGKETLKDVESEEKLEKDDHKWKLKGLKLNTNGKIQYNDLSSLAKFVHKLKQHLKLDFLLEDQYTPLDKINFLQSLYVYLGKHLRYSNRVDSANLKEFSDSSRLFERVLQEQKDGLFKLFEQTDKDDEKILTQTHSLSTKAMLLAITRMTNLDNDEDNQKNNDKGWNFEAIKNFDQKFIDITKTNNNLSLKQDKRYLDDQFINDAILSPGVKRILREATKVFNAILKQFSEEYDVTKVVIELARELSEEKELENTKNYKKLIKKNGDKISEGLKALGIAEDKIEEILKSPTKSYKVLLWLQQDHIDPYSQKEIAFDDILTKTEKTEIDHIIPYSISFDDSSSNKLLVLAESNQAKSNQTPYEFINSGKAEITWEVYEAYCHKFKNGDSSLLDSTQRSKKFAKMMKTDTSSKYDIGFLARNLNDTRYATIVFRDALKDYANNHLVEDKPMFKVVCINGGVTSFLRKNFDPKSWYAKKDRDKNIHHAVDASIISIFSNETKTLFNQLTKFADYKLFKNTDGSWKKIDPKTGVVSEVTDENWKQIRVRNQVSEIAKVIDKYIQDSNIERKARYSRKIENKTNISLFNDTVYSAKKVGYEDQIKRKNLKTLDIHESAEENKNSKVKKQFVYRKLVNVSLLNNDKLADLFAEKEDILMYRANPWVINLAEQIFNEYTENKKIKSQNVFEKYMLDLTKEFPEKFSEAFVKSMIRNKTAIIYNVEKDVVHRIKRLKILSSELKENKWSNVIIRSKNESGTKLSYQDTINSIALMIMRSIDPTAKKQYIRVPLNTLNLHLGDQDFDLHNIDAYLKKPKFVKYLKANEIGDEYKPWRVLTSGTLLIHKKDKKLMYISSFQNLNDLIEIKNLIETEYKENVDSDPKKKKKASQILRSLSVILNDYILLDAKYNFDILGLSKNKIDEILNSKLDLDKIAK

SEQ ID NO: 149 - protein, 1204 aa, Prevotella ruminicola
MERILGIDTGTNSLGWAIVDKDENQYHLVAKGTNIFSEGVKIEKGIESSKAAERTEHRSVRKHYWRRKIRKIRLLTILSDNDLCPRLKHEQLRQWRLKKVYPTDDTFMEWQRTEDKAQVNPYKFRYICLTQKLDLSDITQRFILGRALYHLNQRRGFLSNRKEATKESEGTVKEGISSLSKDMKDSGCEYLGEYFYQLYQQGKKIRNHYTARKEHYLKEFKAICSKQELDDALIEKLEKAIFDQRPLKSQKGQVGTCTFEKGKSRCPSSHPLYEDFRMYSFINNIKVQVDTLYDKGERSLTDEEKQLIIPLFKRKSKRTFPFEDIAKKIAGKNNYCYIKSNEEKAYKFNYQMDTQVSGSPVNAQLEEIFGEDWLSSVCEVYTLANNKSRFQIMNDVWHVLFFYDDEDKLKEFAKDRLQLDDELAEKFSKISIPNDYAALSLKAIRKIMPYLRDYGLIYSEAVFLANLVDVLPQHVWGIKEMREAAIENVIDVMHSYDKNNIDGITLEGCVKTFLKERYQVSDDNLKKLYHPSMLDPYPRQRPNDEGVFQLGSPRISSVKNPMAMHSLFRLRKVVNLMLKKGYITPDTKVHIEFSRDLNDANKRWAIQTWQRENEKERERCRKEIEKYIASPSDTDILKYQLWEEQNHKCLYTGDEIRITDFLGDNPKYDIEHTIPRSAGGDSTKMNLTLCSSRFNRDEKKTKLPAELVNHDEILERISNWKEKYEDIDKQIRKISTKGATSKEDKDSKIRRRHYLILQRDYWRGKYQRFTMTEVPEGFSRRQGTDISVISRYARMYLKSVFKQVYIVKGIATSDFRKMWGIQDEYAKKERVNHVHHCIDAITIACIGKAEYDKLADYRHQYDDYLFQGKTKPTFDKPWPSFVIDIKHIQDELLIAHYAKDNLEKFTKKNLRGKDGRIIRDKFGNKLQMKGDTSRNSLHNDKFYGAINHEGEIKYVYRTNIEALDAKSIGNIVDPTVRSIIESAIAIHGSLKAAINKGIWMNEEKHIPIKKVRVFRNDVKKPIELKDQRDLSDKDYKQHYYVTNDGNYMMLIFSKLNNKGREIRQHVVINSLEATEVIKSHKRSQVGKVVWESYYSKEGFDLIYKLKSGTMILLYENNRDEVWDLDIRNLQKRLYIITKMKYDGRIYMMHHQEAREKKDLEEKSGSFKINEDYRPLIVNSYNQFNALVQDLDFEINDLGEIRRLI

SEQ ID NO: 150 - protein, 1178 aa, Scardovia inopinata
MGKRHNSNMAKKKISYRIGIDVGLNSTGLAAIEVDDDGAPIRILNTMSVIHDGGVDPDAAKVRGTRLAISGIARRTRRMRRRRAKRLDRLEQILEKYGYTDTEPVLEEPYGPWICRAELADGFINDDEQRRMMIGIAIRHIARHRGWRNPYQNVRALLNIDDSDLSEEYKNLKEKVQDQINDGKDLPNFTPSQLVRDYLDNFSGQPAARIRTGKAGPRGNRRDAVGILPQRMRQSDYAYELQRIFDMQKIGRDEAQELLMAVFEAKSPKGSAEKRIGKDPLTGKKRALKASLAFQKYRIVATITNLRIKTGTGSERMLSPTELNDIYTYLLRVQDDNHLPTWEDICEEVLHIGRYQLAGIGKTFEGGERISNMPPVIQTSLAIHGLSEGTLAEKLTKWWDKADDDSRESMIKLLSNTVDIDRVNEVDENFASALDFIDSLDDEELTKLDKIALPRGRAAYSEEALNKLTADMLNTGDDLFSARQRIYHVNNSWRPPQPPIGEPLGNPAVDRVLKITNRYLMNCLNRWGQPRRVTIEHTRSGFTSVKQATEHQKISDKRAEYRRDIVKQLEEAGVESVHEYDIRRWEAVQRQNGQCLYCGRDITFKTCEMDHIVPRKGPGSTNTRTNFAAVCPECNRMKSNIPFASWAETKEAKDRGVSLDKAIKQVRFFNFTKNEYSPQAQRNFKKSMIERLKQKTSDEPLDNRSIESVSWMADELYKRIDWYFNHEQYETSKKAINDDKDNLSGTQVVVYPGSITAEARNAAGLGGNIHFIGGRYKTRLDRRHHAVDACVIAMMEPGIARILTERNQLRQAQRLTARIEDDEVNWKDYPTENTAGYNKYQAWSDRMHALLEYMNNALDYDKIPVVRWERLQLGNRSAHEDTIHPLKKLPLSHEISAIDINHASTPALYEALVSLPDFSEQDGLPADPSRQINVNGERYSGDDLVSFFNSNAAQIAIQGGSAELGTAFHHARIYRCWTVGKNGKKKIFFGMIRVYQHDLLHAKNEDLFTYPLKRSSVSMRYAKKEVVHAILSGNAEYVGYLCVGDELVLDLKGDKSNDEGGSRLSGQVGEFVQKFEEDSKVNSQIVNRWTVDGFPDEAKLRLRPSMFAGEGLKNMKSELVENAAIKNILSKTGWRVSVDVISKKSPVVLRRNAFGEPRWKTNAGLPVSYRWQDTETKE

SEQ ID NO: 151 - protein, 1371 aa, Gordonibacter pamelaeae
MNLRNVESYQVGLDIGTGSVGWAVLDDNGDLCRFKGKPTWGSRVFPTAETAAEARVHRGQRRRYDRRRQRIDLLQRFFADEVAKVDPEFFIRLNQARLHPENRDPAHADYRWPLFNGSNFTEKDYYRQFPTIYHLRAHLLKSDEPADIRLVYLALHNIVKHRGNFLHQDNPSLSARNANVGDAVEALCLALDEWCGAHDVECACDEAALAEALGDASLRPGEKRERAEAALGVEKAHKKLAKAVSSAVVGYAAEFGHVFFAESEGSKFALSNDEKVEAYVCPDEGRDLFDAMRAVHSSYVLMGILSEAQGELLSVCKVGEYERYKRDLETLKSLVRAYGPERYDEFFCGPFYEGTRDYDPGKAQGYTKYNLGASKLSHEDFLKEVQKLLKDIGAQADERYADIERAIEAGAFLRRLKTSDNGTIPYQLHLEEMDAIIERQAAFYPFLAQEKDKLKSLVSFRIPYYVGPLTQKNAARDGKGEARFAWSSRKPGMEDARVYPWNWEDVIDKDQSAEDFIRRMTGTCTYLKGEPVLARCSLDYELFCVLNELAGARWTQDGDKSYRFDAADRLGIVEDLFKKRKRVTYEAAEKWLARTHGPESGKSAGGAYHVSGGQGEDAFESQLSSHYDFCKILGVDELSDADEAMAEDIILWNTVFEDRSILKRKIKLAYGDRLGDAQVRKLCQKRYTGWGRLSGELLRGLRSATDNGPKTIMDILLEGDPNHARRMGAAMNLMEILHDDLLEFQAKIDEHNRERALAVGGMSVDEVTGSPALRRGINQALRVVDEIAGIAGKPPAHIYVEVTRDEGARNKGRRTTSRYRALEAALSSIKAQCADVYAELKERDPRALDDERLTLYFMQCGKCMYSGDALDINKLQTYQVDHILPQSYVKDDSFENKVLVRPDTNQRKGDTLLLDERLIARMRGFWRTLRDAELIGEKKFNNLTRTSVSDEQMKKFVSRQLVETGQMVKQVQQLLQARYPESEVQPVKAGVSHQLRVGCALAKSREINDFHHAHDAYLACQVGRFVQYRHSAVYSEPVKMAAVVKQFIKKQAEDYRRTRELPGSDGFIVSSFMTPGFDVKTGEVFRDAWDAGAEIDRIRRCFDYKDCFISRMPEETHGAFWDATIYSPRAAGKTLSLPLKRGLDPRKYGSYSREQFAYFFVYEAVKPKKKQRVLEFAPVPVRVASALANDPDALEDYARELAEAEGLVFERIRRRKVYKYQQIIVGDSRLYVTGREEVRNARQLAFSQDETKLICRIEQGEECEEGELLDLFRSMQRKYLACAPRLARLMKVAEMEEGFIAATASGKREVLLSLTSIAAAHRNSIDLKPIGRKGSSGQMKITFSKELSTNGILFVDSSVTGMFERRCRLGL

SEQ ID NO: 152 - protein, 1388 aa, Zunongwangia profunda
MKRILGLDLGTNSIGWALVNEAENEKEISKIIKLGVRVNPLTIDEKTNFEKGRPLSTNADRTLKRGARRNLQRYKLRRENLIEILIDNHIITKETPLTEIGKGTTYQTLSLRAKAVRERIDLEDFAKVLLAINKKRGYKSSRKASNDEEGQAIDGMAIAKELYERGITPGQYVLELLENDRKYIPDFYRSDLKQEFNKIWNNQKTFYPEILTDELFKELDGKNKSQTWAICQKPFNIKGIKRITKGREKTIENYHWRVKGLSGKLNLEKLAIILQEINNDINQSSGYLGGISDKSKKLYLNKETVGEFLYKQIAKNPHTSLKNQVFYRHDYLDEFEQIWKTQSNFNANLTDELKQEIRDVIIFYQRKIKSQKSLISFCQFESWEQEYFDKETGKTKTRTVGRRVIPKSSPLFQEFKIWQNLNHLVFTNSETDEKIEIKEVEQEIRKELFEELNLRGDLNPNDLLKILRSQFKIGKLSNWKCNFEKIEGNRTNAALFNIYQKISDFEGYGIDWNKSNAKKIRKELKATFPEIGIDASILEFDAYKKQLTNQSSYELWHLLYSAEEDFKISEQDKLIYGNSSVSLKKKLHLKFGFNPEYAKMLANLSLMSDYGNLSAKAIKKILPYLEDGHLYSEACRLAGYNHSKSLTAEELEKFEPKAKLDLLKKNSLRNPVVEKILNQMVNVVNQVIDTYGKPDGVRIELARELKKSAKERAEMTKGIADGTRRNEEIKKIITQKFGIPNPTKSDLVRYRLWQELESRGYKDIFTDKYISPDKIFSSEIDIEHIIPKALLFDDSFSNKTLSFRNVNLKKANRTALDFITQDYQSNVEAYKERVETWNKDNHISKGKRNKLLMSLKDIPDGFIERDLRNSQYIARKAKRMLYEVFPNEVLATSGSITDKLRSDWDLINVMKELNLPKYKALGLTEYEERLDKGTEELFKHEVIKDWTKRNDHRHHAMDALAVAFTTHNHIQYINNLNARKDITQDNHPIIKNIENLITEVNSKGKRVFKAPMSSFRESAKEQIEAILVSFKNKNKVVTKNINQTKKEGGFNYQNAKTPRGQLHKETIYGKSKQPLEKPVKINNRFCKKQVGLIINFKEQEAVLHHLKKYDNNEKIAFSNKTLKSDPIQVNGSPLREVKIFEEIFTIRKDINPDNFKTQKHLDKIIDKGIKEVMKKRLEEYNGDFKTAFSDLDKNPIWLNQSKGITIKRATISGVTNAEPLHQAKDHLGNIILDDNGKEIPIDYVSTGNNHHVAIYQDESGNLQEEVVSFYEAVIRKNQDQPIIKKRHPKGWKFLFTMKQNEMFVFSSENFNPSEIDLLDEKNAAIISPNLFRVQKIATKNYMFRHHLETEVTNNLDFTYRHFQATEWLRNLCKVRIDHIGRIVQIGEY

SEQ ID NO: 153 - protein, 1082 aa, Methylosinus trichosporium
MRVLGLDAGIASLGWALIEIEESNRGELSQGTIIGAGTWMFDAPEEKTQAGAKLKSEQRRTFRGQRRVVRRRRQRMNEVRRILHSHGLLPSSDRDALKQPGLDPWRIRAEALDRLLGPVELAVALGHIARHRGFKSNSKGAKTNDPADDTSKMKRAVNETREKLARFGSAAKMLVEDESFVLRQTPTKNGASEIVRRFRNREGDYSRSLLRDDLAAEMRALFTAQARFQSAIATADLQTAFTKAAFFQRPLQDSEKLVGPCPFEVDEKRAPKRGYSFELFRFLSRLNHVTLRDGKQERTLTRDELALAAADFGAAAKVSFTALRKKLKLPETTVFVGVKADEESKLDVVARSGKAAEGTARLRSVIVDALGELAWGALLCSPEKLDKIAEVISFRSDIGRISEGLAQAGCNAPLVDALTAAASDGRFDPFTGAGHISSKAARNILSGLRQGMTYDKACCAADYDHTASRERGAFDVGGHGREALKRILQEERISRELVGSPTARKALIESIKQVKAIVERYGVPDRIHVELARDVGKSIEEREEITRGIEKRNRQKDKLRGLFEKEVGRPPQDGARGKEELLRFELWSEQMGRCLYTDDYISPSQLVATDDAVQVDHILPWSRFADDSYANKTLCMAKANQDKKGRTPYEWFKAEKTDTEWDAFIVRVEALADMKGFKKRNYKLRNAEEAAAKFRNRNLNDTRWACRLLAEALKQLYPKGEKDKDGKERRRVFSRPGALTDRLRRAWGLQWMKKSTKGDRIPDDRHHALDAIVIAATTESLLQRATREVQEIEDKGLHYDLVKNVTPPWPGFREQAVEAVEKVFVARAERRRARGKAHDATIRHIAVREGEQRVYERRKVAELKLADLDRVKDAERNARLIEKLRNWIEAGSPKDDPPLSPKGDPIFKVRLVTKSKVNIALDTGNPKRPGTVDRGEMARVDVFRKASKKGKYEYYLVPIYPHDIATMKTPPIRAVQAYKPEDEWPEMDSSYEFCWSLVPMTYLQVISSKGEIFEGYYRGMNRSVGAIQLSAHSNSSDVVQGIGARTLTEFKKFNVDRFGRKHEVERELRTWRGETWRGKAYI

SEQ ID NO: 154 - protein, 1186 aa, Gardnerella vaginalis
MEGNISYAIGIDVGLNSVGLAAIRLDNNGEPIRILKAMSVIHDAGIDPNGAKESDTRKAISGVARRVRRLYRQRRRRLQKLDFLLHSLGFPVVENKDLDFSDSFTPWIFRAKLADEYIADEKQRKQMLSVAIRHIARHRGWRNPYQSIKSMTQETEYSEFYNELLKNIEKFAPGVSCEGSTPAQLVRDYLLSQQGKASRRLRITTDDRRKNHPNSLDPVLPRKLMQSDNMLEILNIFNVQHIDNKYVREQIINAVFYAKSPRGSAENRVGKDAITGKGKRALKASLAFQKYRIISTISNLRIRENSKERCLTIEEKQSVYKLLTTSTDEYSKEKSAEAPLYTWIDVADCLGIERYKLRGVGSQIEDGESVGNRPPMLNSELAILYANAKSLKQSLITWWLAANRTQEDKEAFIEILSNTVDIEAIHDNPEYQDKYGSVIAFIDSMDETEIAALENISLPNGRAAYSLETLDKLNKQMLETDDDLFEARKKLFNLPNNWRPSEAPIAEPTGNPSVDRVLKIVHRFLISAKNRWGNPERINIEHVRSGFQSKKMANSYKKLLDKRTEGKENLKAMMRNSLHLGTSDSISDADIRRYEAVQRQNGQCLYCGSEITYHTCELDHIVPRKGPGSTNTRENLVATCSSCNAQKCNTPFATWCEESTYCKNHDISVDSAINRVRAFIFPPNSYDKRGASQFKKEVIARLKQKVGDEAFDNRSIESVAWMANELHRRIDWYYNSQNYQTNNGISDITNKAQTNVGVYAGSLTAIARRMSGIDGKLEFFDGRRKTRFDRRHHAVDASVIAMMTPGIAQILAIKCNLRETQLLQGNKVVPGGIDWKEYPTANDQGYQQYANWSVRMNALLELLNEEMRADRIAVVNSIRLRYSNSSVHKDDVHALLKLHVGDEIDSETIRRASTPALYCALTRNPDYDVNNGLPENTDRTILLHDKKLNADDSITFFKSKAAQLFVREGSVEIGNSIHHLRIYEYFEKLKSGKVKKSYGMIRVFQDDLHRYIHEDLFSCDLPEQSISMRYADTKVAHAVQTGNANYLGYLVPGDEIIVDFSHVKLSGYIGEFVEFLNKIGANCAAYKHWVVAGTDDKTTLILKPSMISSEGIDKLYSNCERNNFDYASYEKSIDKILVDKGWRVSVNVLDQYKAATIRRNALGEPRWASRSHLPISWSWDTGENRE

SEQ ID NO: 155 - protein, 1434 aa, unidentified
  source 1..1434: note = Bacteroidetes oral taxon 274 str. F0058
MKNILGLDLGTNSIGWAYVKQAQNDSEKSEIAELGVRVNPLTVDEKTNFEKGKPISTNADRTLKRGARRNLQRYKLRRQELIELLKDYQVISDKTILAEDGKETTFETLRLRVKSAKEQVSLEELARILLMINKKRGYKSSRKAKNEDEGQLIDGMEIARRLYDENLTTGQLSLQLLKEGKKSLPDYYRSDLQHELDKVWNFQKQFHPDILTDEFYTSIQGKGQKATRESFSSKYGIDTAENKGSREEKKLQAYQWRADATHKELTKEELAFVITEINNNINNSSGYLGAISDRSKELIFANETVGEYLWKQIQNDPHTSLKNQVFYRQDYFDEFERIWETQSGFYPQILTESLKNELRDILIFYQRKLKSQKALVSICEFESKEIPLKDKQGNPISKNGIPVTKLVGPKVAPKSSPLFQEFKIWQNLNNVLVRPKGSRKRKVTTNQQSTLLEGQEPVFELNLEQKELLFEELNLKGNLKTDYCLELIGYSAKEWEMNYPTLEGNKTNKALYEAYLKIIDSEGYDAKKLLKVKTDKDDINLDDIKVSASEIKTMISDIFNELGINTKILDFDAELERKQFEAQASYRLWHLLYSYEGDDSKSGNELLYRLLEDKFGFKREHSKTLANVSLLSDYGNLSTKAIRTIYPYIKENKFSTACELAGYRHSKLSISKEENENRTLKDTLDVLKKNSLRQPVVEKILNQMINLINELIEKHSEKDEKGNIVKYFKFDEIHIELARELKKNAEERRELDSKVREGKDRNEKIITILKSEFGLPYPTKNDITRYRLYEELKDNGYKDLYTNTYIPREKLFSKEIDIEHIIPKSRLFNDSFSNKTICYRQDNLNKGERTAYDYIEGLGKTQLDEYLNRVENLYTNKFITKAKYRNLLKKESEIGDGFIERDLRETQYIAKKAKEMLLQITRHVVSTTGSITDRLRDDWELVNVMRELNLPKYKVLGLTEIQERKNGQTVEVITDWTKRNDHRHHAMDALTVAFTKHSHIQYLNFLNARKDEKHKEYSNIMGIQQLETEKTTDKDGKDRRVFKTPIPNFRQVAKEHLESILISHKTKNKVVTRATNKIAGSKKQQETLSPRGQLHKETVYGKYRRYVQKEEKIGSKFDLQTIERVANPLYKRLLTKRLEENGGDPKKAFTGKNALAKSPIYLDETQTQQLPEKVKLVWLETDFSIRKDITPDNFKDEKSIDKVLDEGIKRILKDRLKSFDGDAKRAFTDLEQNPIWLNKEKGIAIKRVTISGVSNAEPLHTKKDHLGNEIFDDTGKPIPVDYVSTGNNHHIAIYRDENGNLQEKAVSFFEAVTRANQGLPTVDKTYNQHLGWQFLFTMKQNEMFVFPNKETGFDPQEIDLLDPKNKKLISPNLFRVQKISTKNYFFRHHLETSVETHNALNGVTYKSQLGLNGITDIIKVRINHLGDIVHIGEY

SEQ ID NO: 156 - protein, 1341 aa, Peptoniphilus sp.
MWGSRLFEEASTAQDRREHRSNRRRLERRKYRLDLLEELFVEEINKIDPEFFIRLRESKFHFEDRSLKNTFILFNDKMEGGYNDKVFFSKYPTIYHLRSALINGNKEDVRAVFLAIHNILKNRGHFLLAGNDINISLSLNDTLTDLFEYLKIHLGIEVEFENKLKDIEKIALDKNLSKSDKQKKIVQLLETDYKKQLADVFKLSLGLTANMENIFGKENEQGLEFINAENKIKKIQFDSSYEENIAEFDQFYGEYFEIIDICKKIYDAISLSQILVDGKGLSESKVLSYEKHKEDLKLLKKVLKNIDKAYDNKGEDRLVYKVLKEDKDKGTNYVNYSKLSNNGTATTKEEFYKFLSKNLDLKKFGKLNKEDIETLDYINSEILLGRFLPLQKEKINGVIPYQLQMKELTQILNNASKYLPFLNKIEDGMTVKDKIISLIKFRIPYYVGPLNEYNRIENGNGFAWIEKKKNEKIFPWNFNDVVDIEKSAEKFINNLTNKCTYIKEETVLPKNSIIYSKFMVLNELNNLQYGNKKLDIELKMKMYTDLFLEKKDNRKVTEKRILEYFRINGINDGKEKLTGLNNEIHADMKSYRDMCEIMGENFNINVAENIINWITVFHGEKKILINKIKNVYGKMFNDEQISKLSKLNYSDWGRLSKKLLTDIKCYIDADGINFPVSILEAMEVSNKNLMELLSNKYEFISCIDDINNKYFGDRDISASELIDELYVSPAVKRGIWQSVRILEEIVSIIGHNPKKIFIEMTRHNEEKVQKSSRRHNLEELYKAIRKDPEYVELIKEFDSTTDTDSFKIKKLYLYFMQLGKCAYSKEKIDFDKLFTDSYDIDHIYPRSKTKDDSIHNNLVLVKAKYNREKTDVYPIDINIQKNMNSFWNFLYTKKFITEEKYKRLIRTSDLTDEELAKFISRQLVETSQSTKATAEVLKQIYGDSDICYVKAENVSDFRYGSSRQKDKNDIQKLFVKCREVNHFHHAKDAYLNIVVGNVYDVKFTKNPVNFIKKNKMGNKSNYSLNHMFCFDVERNGYKAWDSSETIKTVGRMMKSNDVRITKHVHPTRGELYDATIYKAKIAKTGSYMPLKSSKNTPLSDVTKYGGYTKIKIAYYSVYKYKFSDKNLIKTEIRLIPIPIYLSKNDDDIKEYVKNYLNDRVNSKLIDFTKIYDKLYVNSLIKINGYLYYLGGKTNDRVWIDNAVSIVLDDKIEYLIKRISNDIKYGYEINVSDDELMDIYESLAEKANKKIFYNRLSDFEKIFSNMDVKKKFVKLEKNDKCRVLLQLLNVLTDSQTTYKLEMVGLKHSRSNIGMKISNLEEFKVINSSITGLYSNEIDILNI

SEQ ID NO: 157 - protein, 1391 aa, Lactobacillus gasseri
MTKIKNEYIVGLDVGTNSCGWVAMDFQNTILRMHGKTAIGSHLFDAGNSAADRRAFRTTRRRIKRRKWRLKLLEEIFDPYMTEVDPYFFARLKESGLSPLDKRKNVSSIVFPTALEDKKFYCNYPTIYHLRYDLMSEDKKFDLREIYLAIHHIVKYRGNFLYNTPVKDFEASKIDVKDSLEKLNELYERLDSEFTVELDSSNALEIEKIIRDKKVFKINKVKSIHQLLSLKTENKERTKLIKDVSKQIINAILGYKTKFETILLKNISKDEADDWEFKLTDVDADNKFENLIGDLNENEQEILLEIRNLANAITLSNIVEEGKTLSESMIDKYNKHSDDLELLKQVISDHPDRDKAKKLALAYDLYVNNRHGKLLQAKDVLGSKKTLSKEDFYKEVKKNLDDSKASQEILDTIALDSFMPKQRTNENGVIPYQLHQLELDRIIKNQGKYYPFLKEVNPVSSHLKEAPYKLDELIRFRVPYYVGPLISPNESTKNKQTKKNQNFAWMIRKEQGQITPWNFDQKVDRMASANKFIKRMTTKDTYLLGEDVLPANSLLYQKFTVLNELNNIKINGKRISVPLKEELYNNLFKKNSTVTTNKLKSYLKENYNLINVEIKGLADEKKFNSGLTTYNKLRNLKIFDQQLDDLNYDKDFERIIEWSTIFEDKAIYKDKLKTIKWLSDRQIDKLSKIRMQGWGQLSKKLLSQLTDNNGQTIIEQLWDSQNNFMQIVNQSDFKDAIAVANQNLLVNTSVEDILNEAYTSPANKKAIRQVVKVVDDIVKAASGKVPKQIAIEFTRDADDKAKISQTRANKLRKVYKELSNELASETIRNELERVAKDQKLLKDKYYLYFMQLGRDAYTGEPINIDDLGQYDIDHILPQSFIKDDSLENRVLVKKAVNNGKSDNVPVKLYGNRMAADLGMTIRHMWEKWKDQGLITKTKYNNLIIDPDKINKYESSGFIHRQLVETSQIIKLVSTILQSKYPDTEIIVVKARYNHYLRKHLNLYKSREVNDYHHAIDAYLSAICGNLLYQVYPYLRPFFVYGQYKKFSSDPKKEKIIYDKTRKYNFISQIFENKSNDIISLETKKKVFDKKDIIEKLKHAYNYKYMLVSRETETHDQEMFKMTVYPRLSRDTKKSRNLISKKKDMPTEIYGGYTNNSDAYMVIARINKKKGTEYRVFGVPMRELVNLRKAEKNGRYNAYLKQVLEPEIMYSKNGKKNKTISSFEIVKAKVPYKQVILDGDKKFMLASSTYVQNAKQLTLSQNSMQAITDNCENDTEEEKALEEKALIEAYDEILTNIDKYLPLFDINKFREKLHAGREKFINLSLDVKKDTILQVLNGLHDNAVMPKIKSLGLSTPLGFMQFSSGVPLSENAKLIYQSPTGLFEKRVKISDL

SEQ ID NO: 158 - protein, 1426 aa, Sphingobacterium spiritivorum
MKHILGLDLGTNSIGWALIKQDFENKQGEILGMGSRIIPMSQDILGDFGKGNSVSQTAERTKYRSVRRLRERFLLRRERLHRILNVLGFLPEHYASQIDFTKRFGKFKEETEPKLVYSNEGFIFKKSFEEMLSDFKTHQPQLLEDNKKIPYDWTIYYLRKKALSRKIEKEELAWILLNFNQKRGYYQLRGEEEEENPNKLIEFYSLKIVDVLADEPQKGKSDIWYSLILENGWIYRRSSKTPLFDWKEKTRDFIVTIDLNDDGSVKTDKEGNEKRSFRAPGENDWTLVKKKTEQEIDSSRKTVGTYIYETLLKNPKQKIKGKLVRTIERKFYKTELKQILEKQKEFHPELRQDDLYSDCVRELYKNNEAHQLTLSKKDFVHLFMEDIIFYQRPLGSQKSSISNCTLEFRKYKDENGTEHTQYLKAIPKSNPYYQEFRIWQWMYNLNIYKKEDDTNVTKDFLNTKADFESLFEFLNNRKEVDQKALLKHFKLNDKTHRWNYVEDKKYPCNETKTMILSRLDKVENISDDFLTREMEQKIWHIIYSVNDKVEYEKALKSFAGKNNLEDNSFFEAFKKFPPFKSEYGAFSEKAIKKLLPLMRMGKFWNYNNISEQSKSRIQKIITGEYDENIKDKVREKAIHLTTETDFQGLQLWLVQYIVYGRHSEAAMLGKWNSADDLEEFLKEFKQHSLRNPIVEQVITETLRVVKDIWQKYGNGAKDFFREIHIELGREMKLPAEERERLTRQISENENTNFRIKALLAEMMDDNSVENVRPFSPMQQEILKIYEEGVLNSDIEIEDDILKISKTAQPSSSDLKRYKLWLEQKYKSPYTGQIIPLNKLFTPEYEIEHIIPQSRYFDDSFTNKIICESAVNKLKDNYIGLEFIKKLGGSIVECGNGKSVAILKHDAYEDFIKKHYANNRSKRNKLLLEDIPEKMIERQMNDTRYISKYISGVLSNIVRVEDGTDEGVNSKNIVPGNGKITTQLKQDWGLNDVWNDLILPRFERMNHLTNSTDFTAWNENHQKFLPTVPVEFSKGFSKKRIDHRHHALDALVIACATKDHVNLLNNQSAKSDTKRYDLKKKLMKFEKVAYNHPQTGERIEREAPKQFLKPWETFTIDAKNHLETIIVSFKQNLRVINKATNYYEKYVEKEGTKVKERVEQKGTNWAIRKPMHKETVSGKIDLPRIKVPKGKILTATRKSLDTSFNLKTIGSITDTGIQKILKNYLQYKDNNPELAFSPEGIEDMNKNIEKFNNGKAHQSISKVRVFELGSKFPLGQSGNKKEKYVEAAKGTNLFFAIYQDKNGKRSYETIPLNEVIERQKQGLSVVDLKGVDDFYLSPNDLVYVPSEDELENISMIDFNKMSSERIYKVVSFTGNQIFFVRQDIATSVVNKAEFSTLNKMERAIDGTMIKETCVKLQIDRLGNISKI

SEQ ID NO: 159 - protein, 1361 aa, Lactobacillus casei; identical to SEQ ID NO: 75

SEQ ID NO: 160 - protein, 1436 aa, Bacteroides fragilis
MKRILGLDLGTNSIGWALVNEAENKDERSSIVKLGVRVNPLTVDELTNFEKGKSITTNADRTLKRGMRRNLQRYKLRRETLTEVLKEHKLITEDTILSENGNRTTFETYRLRAKAVTEEISLEEFARVLLMINKKRGYKSSRKAKGVEEGTLIDGMDIARELYNNNLTPGELCLQLLDAGKKFLPDFYRSDLQNELDRIWEKQKEYYPEILTDVLKEELRGKKRDAVWAICAKYFVWKENYTEWNKEKGKTEQQEREHKLEGIYSKRKRDEAKRENLQWRVNGLKEKLSLEQLVIVFQEMNTQINNSSGYLGAISDRSKELYFNKQTVGQYQMEMLDKNPNASLRNMVFYRQDYLDEFNMLWEKQAVYHKELTEELKKEIRDIIIFYQRRLKSQKGLIGFCEFESRQIEVDIDGKKKIKTVGNRVISRSSPLFQEFKIWQILNNIEVTVVGKKRKRRKLKENYSALFEELNDAEQLELNGSRRLCQEEKELLAQELFIRDKMTKSEVLKLLFDNPQELDLNFKTIDGNKTGYALFQAYSKMIEMSGHEPVDFKKPVEKVVEYIKAVFDLLNWNTDILGFNSNEELDNQSYYKLWHLLYSFEGDNTPTGNGRLIQKMTELYGFEKEYATILANVSFQDDYGSLSAKAIHKILPHLKEGNRYDVACVYAGYRHSESSLTREEIANKVLKDRLMLLPKNSLHNPVVEKILNQMVNVINVIIDIYGKPDEIRVELARELKKNAKEREELTKSIAQTTKAHEEYKTLLQTEFGLTNVSRTDILRYKLYKELESCGYKTLYSNTYISREKLFSKEFDIEHIIPQARLFDDSFSNKTLEARSVNIEKGNKTAYDFVKEKFGESGADNSLEHYLNNIEDLFKSGKISKTKYNKLKMAEQDIPDGFIERDLRNTQYIAKKALSMLNEISHRVVATSGSVTDKLREDWQLIDVMKELNWEKYKALGLVEYFEDRDGRQIGRIKDWTKRNDHRHHAMDALTVAFTKDVFIQYFNNKNASLDPNANEHAIKNKYFQNGRAIAPMPLREFRAEAKKHLENTLISIKAKNKVITGNINKTRKKGGVNKNMQQTPRGQLHLETIYGSGKQYLTKEEKVNASFDMRKIGTVSKLAYRDALLKRLYENDNDPKKAFAGKNSLDKQPIWLDKEQMRKVPEKVKIVTLEAIYTIRKEISPDLKVDKVIDVGVRKILIDRLNEYGNDAKKAFSNLDENPIWLNKEKGISIKRVTISGISNAQSLHVKKDKDGKPILDENGRNIPVDFVNTGNNHHVAVYYRPVIDKRGQLVVDEAGNPKYELEEVVVSFFEAVTRANLGQPIIDKDYKTTEGWQFLFSMKQNEYFVFPNEKTGFNPKEIDLLDVENYGLISPNLFRVQKFSLKNYVFRHHLETTIKDTSSILRGITWIDFRSSKGLDTIVKVRVNHIGQIVSVGEY

SEQ ID NO: 161 - protein, 1517 aa, Bacteroides sp.
MKKIVGLDLGTNSIGWALINAYINKEHLYGIEACGSRIIPMDAAILGNFDKGNSISQTADRTSYRGIRRLRERHLLRRERLHRILDLLGFLPKHYSDSLNRYGKFLNDIECKLPWVKDETGSYKFIFQESFKEMLANFTEHHPILIANNKKVPYDWTIYYLRKKALTQKISKEELAWILLNFNQKRGYYQLRGEEEETPNKLVEYYSLKVEKVEDSGERKGKDTWYNVHLENGMIYRRTSNIPLDWEGKTKEFIVTTDLEADGSPKKDKEGNIKRSFRAPKDDDWTLIKKKTEADIDKIKMTVGAYIYDTLLQKPDQKIRGKLVRTIERKYYKNELYQILKTQSEFHEELRDKQLYIACLNELYPNNEPRRNSISTRDFCHLFIEDIIFYQRPLKSKKSLIDNCPYEENRYIDKESGEIKHASIKCIAKSHPLYQEFRLWQFIVNLRIYRKETDVDVTQELLPTEADYVTLFEWLNEKKEIDQKAFFKYPPFGFKKTTSNYRWNYVEDKPYPCNETHAQIIARLGKAHIPKAFLSKEKEETLWHILYSIEDKQEIEKALHSFANKNNLSEEFIEQFKNFPPFKKEYGSYSAKAIKKLLPLMRMGKYWSIENIDNGTRIRINKIIDGEYDENIRERVRQKAINLTDITHFRALPLWLACYLVYDRHSEVKDIVKWKTPKDIDLYLKSFKQHSLRNPIVEQVITETLRTVRDIWQQVGHIDEIHIELGREMKNPADKRARMSQQMIKNENTNLRIKALLTEFLNPEFGIENVRPYSPSQQDLLRIYEEGVLNSILELPEDIGIILGKFNQTDTLKRPTRSEILRYKLWLEQKYRSPYTGEMIPLSKLFTPAYEIEHIIPQSRYFDDSLSNKVICESEINKLKDRSLGYEFIKNHHGEKVELAFDKPVEVLSVEAYEKLVHESYSHNRSKMKKLLMEDIPDQFIERQLNDSRYISKVVKSLLSNIVREENEQEAISKNVIPCTGGITDRLKKDWGINDVWNKIVLPRFIRLNELTESTRFTSINTNNTMIPSMPLELQKGFNKKRIDHRHHAMDAIIIACANRNIVNYLNNVSASKNTKITRRDLQTLLCHKDKTDNNGNYKWVIDKPWETFTQDTLTALQKITVSFKQNLRVINKTTNHYQHYENGKKIVSNQSKGDSWAIRKSMHKETVHGEVNLRMIKTVSFNEALKKPQAIVEMDLKKKILAMLELGYDTKRIKNYFEENKDTWQDINPSKIKVYYFTKETKDRYFAVRKPIDTSFDKKKIKESITDTGIQQIMLRHLETKDNDPTLAFSPDGIDEMNRNILILNKGKKHQPIYKVRVYEKAEKFTVGQKGNKRTKFVEAAKGTNLFFAIYETEEIDKDTKKVIRKRSYSTIPLNVVIERQKQGLSSAPEDENGNLPKYILSPNDLVYVPTQEEINKGEVVMPIDRDRIYKMVDSSGITANFIPASTANLIFALPKATAEIYCNGENCIQNEYGIGSPQSKNQKAITGEMVKEICFPIKVDRLGNIIQVGSCILTN

SEQ ID NO: 162 - protein, 1399 aa, Olsenella uli
MNLRNTTDEYNIGLDMGTNSVGWAVTDKAGAIAHFKGKPTLGSRLFDAAQTAAGARIHRSQRRRYVRRRWRLDLLQSLFQDEVSKVDSEFFCRLRQSRLYVGDREKGHADYTWPIFNDSDFNEVDYYKRFPTIYHLRKWLMETDEKADIRLIYLATHNIVKHRGNFLRENNKSLSSRDANPAQAVKSLRLALNDWCSERDYECAWKGEEDDGAIDEAILNVLADGEKGRSDQAKEIAKLTGVDCGDAKQSKQCNEAIAKAIVGLKVEMKNIFGEFPAEKTSYIYLSSDEDVEAVRESCPDDSGELFQALCKLYSAYILQELLSYADPSGQTISANMVAKYKQYGRDLRLLKELTRTYAPQKYDLFFRGETYAGSSDYVVDEARGYTRYNLGTTKANYDDFQKSVKELFKGTDALQDERYQEMMVAFGEQKFLRRLKTSDNGSIYYQLHLEELHTILENQGKHYPFLLSEEDKIESLVSFRIPYYVGPLTRKNAAIGHDGKERFAWSSRKDGMEHAVITPWNWEEIIDRDKSAEDFIMRMTGDCTYLQGEPVLPKCSLLYEEFCALNEFNGAHWTVDGDDERRFDAAQRERIMCDLFRRTRSVTYNKVSDWLERKYNFTGARVRGGQGEHGFESKLGSYIFFCKDVFKTDGLDEADYTMIEQIILWSTLFEDRDILKRKIEEAYGGDRLTSEQIKVICKKRFTGWGRLSKRLLTDIKVNTDTGRKSIMDVLREGNPNNGQRSRTMVFMEVLRDEDLGFQKAIDGLNRDYFREHNNGLMDVNDLPGSPAIRRSINQAVRIVDEIASIARKEPTNIFIEVTREEDDPRKKGKRTKRRYDAIKSALEKFKKDDPSLWKELCEKAPGDMDERLSLYFMQRGKCMYSGRPIKIEELHTGKYEVDHIIPRSYIKDDSFENKVLVYREENQHKTDALLIDSSIRQKMGGYWRMLHDAKLVGDKKFRNLFRNHIDDKAMKGFVARQIVETSQMVKLVQTLFEARYPNTRIVPVKAGISHDLREAAGLVKCREANDFHHAHDAFLACRIGLFIQKRHPSVYDNPIGLARIMRDYARMQAREYKKSHCLAHTQGFIVNSFLSSGFDEETGEIFKDDWDAKAEVEGIRRVLNCRQCFISRMPVEGDTRYGGRYWGETIYSPKGKHKHEIPLKQGLDPNLYGGYSDLLYSYFLIYEASDVSSGERVLRFIGIPTSIAARMANQKRLEEYVSRLALQENLEHVRMVRKIMKKQLIEVDNCRLLVTAADAVTNATELAFSLDEMKIISTCAKCINGADPSAIDKIGNAQDSFFDNLKRRGSDRCALLFSQLKLDKLSQNFYMISSDDKSKILISILDRIRAKSNSVDLSLVGGAKHAAQMKFDFNAKLNNPASSFVLIDQSVTGMFERRTRIGL

SEQ ID NO: 163 - protein, 1398 aa, Veillonella atypica
METQTSNQLITSHLKDYPKQDYFVGLDIGTNSVGWAVTNTSYELLKFHSHKMWGSRLFEEGESAVTRRGFRSMRRRLERRKLRLKLLEELFADAMAQVDSTFFIRLHESKYHYEDKTTGHSSKHILFIDEDYTDQDYFTEYPTIYHLRKDLMENGTDDIRKLFLAVHHILKYRGNFLYEGATFNSNAFTFEDVLKQALVNITFNCFDTNSAISSISNILMESGKTKSDKAKAIERLVDTYTVFDEVNTPDKPQKEQVKEDKKTLKAFANLVLGLSANLIDLFGSVEDIDDDLKKLQIVGDTYDEKRDELAKVWGDEIHIIDDCKSVYDAIILMSIKEPGLTISQSKVKAFDKHKEDLVILKSLLKLDRNVYNEMFKSDKKGLHNYVHYIKQGRTEETSCSREDFYKYTKKIVEGLADSKDKEYILNEIELQTLLPLQRIKDNGVIPYQLHLEELKVILDKCGPKFPFLHTVSDGFSVTEKLIKMLEFRIPYYVGPLNTHHNIDNGGFSWAVRKQAGRVTPWNFEEKIDREKSAAAFIKNLTNKCTYLFGEDVLPKSSLLYSEFMLLNELNNVRIDGKALAQGVKQHLIDSIFKQDHKKMTKNRIELFLKDNNYITKKHKPEITGLDGEIKNDLTSYRDMVRILGNNFDVSMAEDIITDITIFGESKKMLRQTLRNKFGSQLNDETIKKLSKLRYRDWGRLSKKLLKGIDGCDKAGNGAPKTIIELMRNDSYNLMEILGDKFSFMECIEEENAKLAQGQVVNPHDIIDELALSPAVKRAVWQALRIVDEVAHIKKALPSRIFVEVARTNKSEKKKKDSRQKRLSDLYSAIKKDDVLQSGLQDKEFGALKSGLANYDDAALRSKKLYLYYTQMGRCAYTGNIIDLNQLNTDNYDIDHIYPRSLTKDDSFDNLVLCERTANAKKSDIYPIDNRIQTKQKPFWAFLKHQGLISERKYERLTRIAPLTADDLSGFIARQLVETNQSVKATTTLLRRLYPDIDVVFVKAENVSDFRHNNNFIKVRSLNHHHHAKDAYLNIVVGNVYHEKFTRNFRLFFKKNGANRTYNLAKMFNYDVICTNAQDGKAWDVKTSMNTVKKMMASNDVRVTRRLLEQSGALADATIYKASVAAKAKDGAYIGMKTKYSVFADVTKYGGMTKIKNAYSIIVQYTGKKGEEIKEIVPLPIYLINRNATDIELIDYVKSVIPKAKDISIKYRKLCINQLVKVNGFYYYLGGKTNDKIYIDNAIELVVPHDIATYIKLLDKYDLLRKENKTLKASSITTSIYNINTSTVVSLSNKVGIDVFDYFMSKLRTPLYMKMKGNKVDELSSTGRSKFIKMTLEEQSIYLLEVLNLLTNSKTTFDVKPLGITGSRSTIGVKIHNLDEFKIINESITGLYSNEVTIV

SEQ ID NO: 164 - protein, 795 aa, Prevotella disiens
MEKQRILGLDPGTNSLGWAVLDFDNSKQEYNLVRKGEVIFEEGVGKSKRGEFSKAAYRTFYKSTRKHYFRRRLRKIEVLKVLVKYDFCPYLSDDLLKQWHEKKIYPAVKEFMDWQRTSDAEGKNPYYDRHCCLNEKLDLSLKSDRYVLGRALYHLTQRRGFKSNRLIQNNDENEEGKVKKGISELSTEMQEANCNYLGDYFYKLYTEKGNTVQIRKRYTDREKHYKNEFNAICEKQELNETIVKELDKAIFFQRKLKPQRHGVGKCTFEPNNRRCAISHPDFERFRMLCFINNIKIKTPFEENLRPLNNEEKALIEPLFYRKSIKNFDFEEIAKKLAGKNNYCYIKDDSSKQYKFNYRMSQGASTCQTIAKLKSIFGEEWKNGIAETYTNRRKKEGLKKQAEMVDDIWNVLYSVSECDVLKDFAINKLQLDEKTADNFSKTKLAQGFATLSLKAIRKILPFLEQGFGYTEAVFLANIPTVVGKEYWNNEDIRNDIMEEIKTIFYHNTLKTNDSHNTILFCIKDILSNNFDLAPGAIDKLYHPSMINVYKDVIPNEDGILQLGSPKIDAVKNPMAMRSLHIIRKVVNELLREGIINSDTEVRIEYARELNDANKRHAIADWQKKQYGKHQKYRKEIKELFKAETGFEIEPNETDILKFELWEEQNHICLYTGQEIGISEFVGENPKYDIEHTIPRSLGGDSTKMNMTLCENKFNRENKQKKLPSELANHSEILERIDDWKKKIYILQKKYDSIRTHNGMDKENKDKKIVSMQVRISGSSICVYSQNTLLWLQYGYN

SEQ ID NO: 165 - protein, 1428 aa, unidentified
  source 1..1428: note = Burkholderiales
MGKTHIIGVGLDLGGTYTGTFITSHPSDEAEHRDHSSAFTVVNSEKLSFSSKSRTAVRHRVRSYKGFDLRRRLLLLVAEYQLLQKKQTLAPEERENLRIALSGYLKRKGYARTEAETDTSVLESLDPSVFSSAPSFTNFFNDSEPLNIQWEAIANSPETTKALNKELSGQKEADFKKYIKTSFPEYSAKEILANYVEGRRAILDASKYIANLQSLGHKHRSKYLSDILQDMKRDSRITRLSEAFGSTDNLWRIIGNISNLQERAVRWYFNDAKFEQGQEQLDAVKLKNVLVRALKYLRSDDKEWSASQKQIIQSLEQSGDVLDVLAGLDPDRTIPPYEDQNNRRPPEDQTLYLNPKALSSEYGEKWKSWANKFAGAYPLLTEDLTEILKNTDRKSRIKIRSDVLPDSDYRLAYILQRAFDRSIALDECSIRRTAEDFENGVVIKNEKLEDVLSGHQLEEFLEFANRYYQETAKAKNGLWFPENALLERADLHPPMKNKILNVIVGQALGVSPAEGTDFIEEIWNSKVKGRSTVHSICNAIENERKTYGPYFSEDYKFVKTALKEGKTEKELSKKFAAVIKVLKMVSEVVPFIGKELRLSDEAQSKFDNPYSLAQLYNLIETERNGFSKVSLAAHLENAWRMTMTDGSAQCCRLPADCVRPFDGFIRKAIDRNSWEVAKRIAEEVKKSVDFTNGTVKIPVAIEANSFNFTASLTDLKYIQLKEQKLKKKLEDIQRNEENQEKRWLSKEERIRADSHGICAYTGRPLDDVGEIDHIIPRSLTLKKSESIYNSEVNLIFVSAQGNQEKKNNIYLLSNLAKNYLAAVFGASDLSQITNEIESTVLQLKAAGRLGYFDLLSEKERACARHALFLNSDSEARRAVIDVLGSRRKASVNGTQAWFVRSIFSKVRQALAAWTQETGNELIFDAISVPAADSSEMRKRFAEYRPEFRKPKVQPVASHSIDAMCIYLAACSDPFKTKRMGSQLAIYEPINFDNLFTGSCQVIQNTPRNFSDKTNIANSPIFKETIYAERFLDIIVSRGEIFIGYPSNMPFEEKPNRISIGGKDPFSILSVLGAYLDKAPSSEKEKLTIYRVVKNKAFELFSKVAGSKFTAEEDKAAKILEALHFVTVKQDVAATVSDLIKSKKELSKDSIENLAKQKGCLKKVEYSSKEFKFKGSLIIPAAVEWGKVLWNVFKENTAEELKDENALRKALEAAWPSSFGTRNLHSKAKRVFSLPVVATQSGAVRIRRKTAFGDFVYQSQDTNNLYSSFPVKNGKLDWSSPIIHPALQNRNLTAYGYRFVDHDRSISMSEFREVYNKDDLMRIELAQGTSSRRYLRVEMPGEKFLAWFGENSISLGSSFKFSVSEVFDNKIYTENAEFTKFLPKPREDNKHNGTIFFELVGPRVIFNYIVGGAASSLKEIFSEAGKERS

SEQ ID NO: 166 - protein, 1025 aa, unidentified
  source 1..1025: note = Gammaproteobacteria
MGGYMPQLMRYRLALDIGSTSIGWAMIRLSMQNEPIAIIRMGVRIFSDGRNPKDGSSLAVTRRVARQMRRRRDRLLKRKTRLLNALVQKKFFPEDADARKALVVLNPYELRKEGLYRQLSGPEFGRALFHISQRRGFLSNRKTDKKDNDSSVLKKAIVDLRQQLEVENCQTIGEWLFKQQQSGKSVRARLRGKTQKDKAYDFYIDRAMIAHEFDTLWVSQAKYDPLLFNEDARAILRDILLYQRPLKPVKPGRCTLIPDESRAPLALPLTQQARIYQELNHLRITTPALGAQALTVAQRNTIAALLEKSDVTFVKIAKALGLTSTTEFNLQDIKRDRLKGNATAIILARNQYFGRRWHDFNADLQNLIVDKLVNEGSETALIEWLKANTDVDESAAERVSGVTLPEGYGSLSVAALRRLLPALKEDVVVYSEAVKRAGFDSHSALSLIEQTGELYQELPYYGEVLQRHVGFGSGDPNDSPERRFGKIANPTVHIGLNELRKIINALIKRYGNPAEVVVELARDLKLSREKRKEIQEEQKQRQDRNEKRIKDACEILGIDPLVIDRGKRREISQKMQLWDELNPKDAANRRCPYTGDQISIEKLLSAEVEIEHILPFSKTLDDSLNNKTVAMRRANRDKGNRTPYEAFGESLNPDYDYDAILQRASLMPREKRKRFASDGYQQWLRDDKDFLSRALNDTAYLSRIAKEYLTLICPPNSVRAIPGRMTAQLRAMFGLNRLLSEGGIKNREDHRHHAIDAAVIGVTDQGLLQKFSRASARTRELQLSRLVDDMPLPWDTYREHVTRALEHLVVSHKPDHGYQGKMHEDTAWGLRDNGQVTRRVRSEDGGPRQRLLENKNVVKINSTRDFSRHGIDEQGQVNAYKGYVGGSNYCIEIWIDEKGKWNSDVVSTFQAYQIVRELGEKAAWQKLRNPLLSLSAKPLVMRLIIDDVVKMQIAGQNKIMRVVKIAQNGQIFFAEHNEANVDARDKDKNNPFKYISKTAGSLQKAGGIHMAISPIGDARPVRYGR

SEQ ID NO: 167 - protein, 1364 aa, Pediococcus acidilactici
MGDRKYNLGLDIGTSSIGFAAVDENNQPIRVKGKTAIGVRLFEEGKTAADRRGFRTTRRRLSRRRWRINLLNEIFDAHLAEVDPTFLARLKESNRSNLDPKKSFQGSLLFPERKDYQFYEEYPTIYHLRKALMEKDRKFDFREIYLAVHHIIKYRGNFLNGTPMRSFKVENIELDTLFDQLNQLYAEIVPDNELAFDLAQVADVKDVLSSTTIYKMDKKKQLVKMMLLPASNKALQSENKKIVTQFVNAILNYKFKLDVLLQVETDADWSLKLNDEGADDKLEEFTGDLDENRLEIIDLLQRLHNWFSLNEITKDGNSLSAAMVEKYENHHHHLGLLKKVIENHPDAKKAKALKETYTAYVGKTDDKTQNQDDFYKAVEKNLDDSPDAKEIKRLIQLDQFMPKQRTGQNGAIPHQLHQQELDQIIEKQSKYYPFLAEPNPNVKRRKDAPYKLDELIAFKIPYYVGPLVTPEEQAQNGENVFAWMKRKAAGPITPWNFDEKVDRMESANRFIRRMTTKDTYLFGEDVLPAESMIYQKFVVLNELNNLKINGRHLSLKDKQDVYNDLFKQQKTVSIKALQNYYVTKKKAATAPTVGGLADPKKFLSSLSTYIDFKNMFGERVNDPQFQEDLEQIVEWSTIFEDRGIFKAKLQALGWLSEKQIQQLVAKRYKGWGRLSKKLLTGLKNAEGYSILDEMWRSTGNFMQIQSRPEFAALIQQANEKQFEGNDPDNVWENIENILGDAYTSPQNKKAIRQVVKVVQDIEKAVGNPPEKIAIEFTREAAANPQRTQSRLRTLEKLYESAEEVVDAGLTAELAEFKENKHVLSDKYYLYFTQLGRDVYTGDTISLDKLNDYDVDHILPQSFIKDDSLDNRVLTIRAVNNGKSDNVPAKMFGKKMGSFWRYLLDNGMISKRKYNNLITDPDNISKYAQKGFINRQLVETSQVIKLTANILNGIYDKDTEIIEVPAKMNSQMRKMFDLVKVREVNDYHHAFDAYLTIFIGNYLYKCYPKLQPYFVYDNFKKFGNKEDIGHKRFNFLGKIEREKKVVAPETGEILWSNVAPNETIKQIKKVYDYKFMIVSREITTRRAELFNQTVYPKNYHGKLIPIKEDRPTDLYGGYSGNTDAYLAIVALEDKKKGKYFKVVGIPTRVAAKLEKLKQQDSQQYLQALHKVIAPQFTKSTKKGIKKTEFEIVLDKVHYRQLVQDGPVKMMLGSSTYKYNAKQLVLSEKALQVIADDRKFDETQKDDNLIAVYDEILSIVNQSFDLYDINGFRKKLNDNRDQFIDLPAETKYEGRKVVAHGKREMILEILKGLHANAAFGNLKPIGFSTAFGQLQVPNGIILSKNAILIHQSPSGLFERKIKLSDL

SEQ ID NO: 168 - protein, 1364 aa, Peptoniphilus duerdenii
MKNLKEYYIGLDIGTASVGWAVTDESYNIPKFNGKKMWGVRLFDDAKTAEERRTQRGSRRRLNRRKERINLLQDLFATEISKVDPNFFLRLDNSDLYREDKDEKLKSKYTLFNDKDFKDRDYHKKYPTIHHLIMDLIEDEGKKDIRLLYLACHYLLKNRGHFIFEGQKFDTKNSFDKSINDLKIHLRDEYNIDLEFNNEDLIEIITDTTLNKTNKKKELKNIVGDTKFLKAISAIMIGSSQKLVDLFEDGEFEETTVKSVDFSTTAFDDKYSEYEEALGDTISLLNILKSIYDSSILENLLKDADKSKDGNKYISKAFVKKFNKHGKDLKTLKRIIKKYLPSEYANIFRNKSINDNYVAYTKSNITSNKRTKASKFTKQEDFYKFIKKHLDTIKETKLNSSENEDLKLIDEMLTDIEFKTFIPKLKSSDNGVIPYQLKLMELKKILDNQSKYYDFLNESDEYGTVKDKVESIMEFRIPYYVGPLNPDSKYAWIKRENTKITPWNFKDIVDLDSSREEFIDRLIGRCTYLKEEKVLPKASLIYNEFMVLNELNNLKLNEFLITEEMKKAIFEELFKTKKKVTLKAVSNLLKKEFNLTGDILLSGTDGDFKQGLNSYIDFKNIIGDKVDRDDYRIKIEEIIKLIVLYEDDKTYLKKKIKSAYKNDFTDDEIKKIAALNYKDWGRLSKRFLTGIEGVDKTTGEKGSIIYFMREYNLNLMELMSGHYTFTEEVEKLNPVENRELCYEMVDELYLSPSVKRMLWQSLRVVDEIKRIIGKDPKKIFIEMARAKEAKNSRKESRKNKLLEFYKFGKKAFINEIGEERYNYLLNEINSEEESKFRWDNLYLYYTQLGRCMYSLEPIDLADLKSNNIYDQDHIYPKSKIYDDSLENRVLVKKNLNHEKGNQYPIPEKVLNKNAYGFWKILFDKGLIGQKKYTRLTRRTPFEERELAEFIERQIVETRQATKETANLLKNICQDSEIVYSKAENASRFRQEFDIIKCRTVNDLHHMHDAYLNIVVGNVYNTKFTKNPLNFIKDKDNVRSYNLENMFKYDVVRGSYTAWIADDSEGNVKAATIKKVKRELEGKNYRFTRMSYIGTGGLYDQNLMRKGKGQIPQKENTNKSNIEKYGGYNKASSAYFALIESDGKAGRERTLETIPIMVYNQEKYGNTEAVDKYLKDNLELQDPKILKDKIKINSLIKLDGFLYNIKGKTGDSLSIAGSVQLIVNKEEQKLIKKMDKFLVKKKDNKDIKVTSFDNIKEEELIKLYKTLSDKLNNGIYSNKRNNQAKNISEALDKFKEISIEEKIDVLNQIILLFQSYNNGCNLKSIGLSAKTGVVFIPKKLNYKECKLINQSITGLFENEVDLLNL

SEQ ID NO: 169 - protein, 1089 aa, Corynebacterium matruchotii
MNSANVNYRVGIDVGSYSLGMAAIAIDDDGKPTEILSAISLIHDSGVDPDSAKSAATRLATSGIARRTRRLYRRKRKRLAKLDKFISSQGWPLKEFEKYEDPFYPWRVRAELATTAITDQQELGEKLSIALRHIARHRGWRNPYSKVTALYTVTEPSDAFLAMQEECAKQLGRTIPETITVGQLVTGMNLGKTRLRGENSLLAARPRQSDNANEIHTIAKVQGLSNELVRQIIDHVFAAESPKGSAAEQVGKDPLQPTKKRALKASDAFQQYRIAALIGNLRIRGGKGNRRLTTEETRLVFDYLRSLPAKQEPTWQLVAEQLKIDRGNLVGTAIMTDDGERAGAKPPVHDTNRIMENTKIKPLATWWKSADADARAAMVKALSNAEVDDFDSQAGAQVQEFFFGISDEDQEKLDGLHLPIGRAAYSEDTLDRLTKRMIGEGMDLYEARQAEFKISNDWAPPAPEIGERVGNPAVDRVLKATARWLNAAERQWGAPKSVNIEHVRAAFMSESSARELDRDNQQRAKRNVKVVAEMQEKLGIEGRPSRADVWRFQSIQRQNGKCAYCGAEISFKNSEMDHIIPQAGEGSTNTRDNLVAVCRECNSSKSNIAFAVWAENTSRPGVSVQKAIERTHHWVTDSGLRKPEFDKFRKQVCDRLRRKATDEPIDARSLESVAWMANELRSRIAQKFKDGDTKVRVYKGALTAEARRASGISGKLEFVDGKGKSRLDRRHHAVDAAVVAFTSNYVAETLALRSNMKFDQELRRKAPQWREFTGSDHVHQVEWTKWKYRMQALAELLNNALVQDRIVVMHNLRLRLGNGAAHEDTIGKLTRLKVGDAISTTDIDRASSEALWCALTRDPDYDPKTGLPENPNRTIRIHGTHLTASDEITVFPVAAASIPIRDGFAKLGSNYHHVRLFRVPSGKKYKYCLMQVYTVDLLKFRKEDLFTVELKPQTISVRTCEALLRKALANGTAEYLGWLVSDDELLIDTSSFDTPGIVKLREEYGPVNRWRLAGLTSVTRLNLRPLYLSKEGLKPNVNPEIKKIIDNRSWIITVNKLFSSGHVKIIRRDALGRPRLHSAAHLPICWEVK

SEQ ID NO: 170 - protein, 1134 aa, Streptococcus mitis
MNGLVLGLDIGIASEGVGILEKNSGKIIHANSRLFPAATADNNVERRKNRQARRLNRRKKHRGVRFQDLFEDYGLLTDFSKVSINLNPYRLRVDGLNQQLTNEELFIALKNIVKRRGISYLDDASEDGGAVSSDYGKAVEENRKLLAEQTPGQIQLERFEKYGQVRGDFTVVENGEKLRLINVFSTSAYKKEAERILRKQQEFNNQITDEFIEDYLKILTGKRKYYHGPGNEKSRTDYGRFRTDGTTLDNIFGILIGKCTFYPEEYRASKASYTAQEFNLLNDLNNLTVPTETKKLSEEQKKVIVEYAKEAKTLGASTLLKYIAKMIDASVDQIRGYRVDVNNKPEMHTFEVYRKMQSLETISVGELSRNVLDELAHILTLNTEREGMEEAINTKLKDSFSQDQVLELVQFRKNNSSLFSKGWHNFSLKLMMELIPELYETSEEQMTILTRLGKQKSKETSKRTKYIDEKELTEEIYNPVVAKSVRQAIKIINEATKKHGIFDNIVIEMARENNEEDAKKDYIKRQKANQDEKNAAMEKAAFQYNGKKELPDNIFHGHKELATKIRLWHQQGEKCLYTGKTIPISDLIYNQYKYEIDHILPLSLSFDDSLSNKVLALATANQEKGQRTPFQALDSMDDAWSYREFKSYVKDLKSLSNKKKDYLLTEEDISKIEVKQKFIERNLVDTRYSSRVVLNALQDFYKSHQFDTTISVVRGQFTSQLRRKWGLEKSRETYHHHAVDALIIAASSQLRLWKKQNNPLITYKEGQFVDSQTGEIISLTDDEYKELVFKAPYDHFVDTLSSKTFEDSILFSYQVDSKFNRKISDATIYATRKAKLDKEKKEYTYTLGKIKDIYSLGTKTPSKTGFYKFLDLYNKDKSQFLMFQKDRKTWDEVIEKIMEQYRPFKEYDKTGKLVDFNPFEKYRQENEPIRKYSKKGNGPEIKSLKYYDILLGKHKNITPEGSRNTVALLSLNPWRTDVYYNMETKKYEFLGLKYADLPFEEGGAYGISTETYNELREKEGIGKNSEFKFTLYKNDLILIKDTETNCQQIFRFWSRTGKDNPKSFEKHKIELKPYEKARFEKGEELEVLGKVPPSSNQLQKNMQIENLSIYKVKTDVLGNKHFIKKEGDKPKLKF

SEQ ID NO: 171 - protein, 1373 aa, Streptococcus bovis
MTKKNYSIGLDIGTNSVGWAVITDDYKVPAKKMKVLGNTDKKYIKKNLLGALLFDSGETAEATRLKRTARRRYTRRKNRLRYLQEIFAEEMTKVDESFFQRLDESFLRWDDDNKKLGRYPIFGNKADVVKYHQEFPTIYHLRKHLADSSEKADLRLVYLALAHMIKFRGHFLIEGELNAENTDVQKIFADFVGVYDRTFDDSHLSEITVDAASILTEKISKSRRLENLIKYYPTEKKNTLFGNLIALALGLQPNFKMNFKLSEDAKLQFSKDSYEEDLGELLGKIGDDYADLFTSAKNLYDAILLSGILIVDDNSTKAPLSASMIKRYVEHQEDLEKLKEFIKANKSELYHDIFKDKNKNGYAGYIENGVKQDEFYKYLKNTLSKIAGSDYFLDKIEREDFLRKQRTFDNGSIPHQIHLQEMHAILRRQGDYYPFLKENQDRIEKILTFRIPYYVGPLARKDSRFSWAEYHSDEKITPWNFDKVIDKEKSAEKFITRMTLNDLYLPEEKVLPKHSHVYETYAVYNELTKIKYVNEQGKDSFFDSNMKQEIFDHVFKENRKVTKEKLLNYLNKEFPEYRIKDLIGLDKENKSFNASLGTYHDLKKILDKAFLDDKVNEEVIEDIIKTLTLFEDKDMIHERLQKYSDIFTADQLKKLERRHYTGWGRLSYKLINGIRNKENNKTILDYLIDDGSANRNFMQLINDDTLPFKQIIQKSQVVGDVDDIEAVVHDLPGSPAIKKGILQSVKIVDELVKVMGDNPDNIVIEMARENQTTNRGRSQSQQRLKKLQNSLKELGSNILNEEKPSYIEDKVENSHLQNDQLFLYYIQNGKDMYTGDELDIDHLSDYDIDHIIPQAFIKDDSIDNRVLTSSAKNRGKSDDVPSLDIVRARKAEWVRLYKSGLISKRKFDNLTKAERGGLTEADKAGFIKRQLVETRQITKHVAQILDARFNTESDENDKVIRDVKVITLKSNLVSQFRKDFEFYKVREINDYHHAHDAYLNAVVGTALLKKYPKLASEFVYGEYKKYDIRKFITNSSDKATAKYFFYSNLMNFFKRVIRYSNGKVIVRPVVEYSKDTEDIAWDKKSNFRTICKVLSYPQVNIVKKVETQTGGFSKESILPKGDSDKLIPRKTKKAYWDTKKYGGFDSPTVAYSVFVVADVEKGKAKKLKTVKELVGISIMERSFFEENPVEFLENKGYHNIREDKLIKLPKYSLFEFEGGKRRLLASASELQKGNEMVIPGHLVKLLYHAQRINSFNSTKYLDYVSAHKKEFEKVLSCVEDFANLYVDVEKNLSKIRAVADSMDNFSIEEISNSFINLLTLTALGAPADFNFLGEKIPRKRYTSTKECLNATLIHQSITGLYETRIDLSKIGEE

SEQ ID NO: 172 - protein, 1099 aa, Corynebacterium accolens
MSLLYRVGIDVGTYSLGCTAIEVDDNDQPVSILSSVSLIHDSGLDPDQQKRAVTRLASSGVARRTRRLYRRRRRRMVKLENFLTAQGWETLPFERYSDPYLPWHARVALVNGYISDDTQRGQYLSIAFRHIANHRGWRNPYWKVSSLYSPDKPSDAFEQIRKELEASTGRQIPETATVGQLISFAQFGKDRLRGGGKQKDKKKPQEQVNQAVISARLHQIDHAREINEICRVQKIDDTLRKQILDLVFAAESPKGAQKGRVGKDPLQPKLFRALKASDAFQQYRIAALTGNLRIYRNGVTVPLDRDEKLIVFNYLVNLPKKEEPSWLKIAEILNIDRGQLRGTATMTDDGERAGATPPVHDTNRTILDSKVKPLAHWWENASDDERAAMLKSLSNSEVEDFDSPAGAQVQAFFADLDETEQEKLDSLHLPMGRAAYSEDTLMRLTNRMLDENLDLYEARLAEFGIPKDWAPPAPRIGEPVGNPAVDRVLKGVARWLEAAADEWGAPKSVVIEHVRDGFVSKSKAIEIDRANNNRHKRNRELFQKMQENLGIEGKVRSSDLWRYQSVQRQNCQCAYCGSPITYTTCEMDHIVPRAGEGSTNTRDNLVATCHRCNLAKKNIPFAVWAEKSTIPGVSVKEALDRTRHWSEDSGMSKKDFQKFRKNVCERLNRTVVDEPLDARSMESVAWMANELRGRVAQRFQEENTTVNVYRGALTAEARRAAGITDKLRFIDGTGKSRLDRRHHAVDAAVVAFIHNYVAETLAIRSNKKREAQLLQGTSQWKEFTGSDDKHRAVWNAWIPKMQKLAVLLQIALDEDRIVVTSNLRLRLGNGRAHEDTISELKTIRVGDAISVTDIDRASSEALWCALTREPDFDEKDGLPENPNRRIRVHGTWYDAEDEIEVFPVGAGAIKVRGGYAKLSRFHHARVYKIPGKKAPIYCMLRVYNTDLVQHRHEDLFSVELKPQTMSVRQAEPKLRKALAENTAEYLGWLVTDDELIIDTSTFRTGLIEEMQSEFGLVRRWRLDGFDSPSLLTLRPLHMSAEGLPDDCALGSRKIIDTKGWRVSINKVFNAGNTTVVRRDALGRARLTSNAHLPISWKEE

SEQ ID NO: 173 - protein, 1054 aa, Actinobacillus pleuropneumoniae
MKLTPLNYILGLDLGIASVGWAVVEIDEQENPLGLIDVGVRTFDRAEVAKTGESLALARRLARSSRRLVKRRADRIKKVKRLLKSENILLSADEQLPNDVWQLRVKGLDQKLERQEWAAVLLHLLKHRGYLSQRKNESKSENKELGALRSGVAANHQILQSAEYRTPAEIAVKKFHVEEGHIRNQRGAYTHTFSRLDLLAEIELLFTRQTELGNPHTSAKLLENLTALLMWQKPALAGEAILKMLGKCTFEPTEYKAAKNSYSAERFVWLTKLNNLRILEQGAERALTDNERFALLDQPYEKAKFTYAQARTMLALPDEAIFKGVRYQGEDKKAVETKTILMEMKAYHQIRKALENADLKAEWNELKNNSELLDDIGTAFSLHKTDEDICRYLDGKLSESILNALLENLNFDKFIQLSLKALQQILPLMLQGQRYDEAVSAIYGDHYGKKSAEINRLLPTIPADEIRNPVVLRTLTQARKVINAVVRLYGSPARIHIETGREVGKSYQDRKKLEKQQEDNRKHRESAVQKFKEYFPNFVGEPKGKDILKMRLYELQQAKCLYSGKSLELHRLLEKGYVEVDHALPFSRTWDDSFNNKVLVLANENQNKGNLTPYEWLDGKNNSEPWQNFVARVQTSGFSHTKKQRILSHKLDEKGFIERNLNDTRYVVRFLCNFIADNMLLTGKGKRKVFASNGQITALLRGRWGLQKVRDDNDRHHALDAVVVACSTVAMQQKITRFVRYEEGNVFSGERIDRETGEIIPLHFPSPWAFFRENVEIRIFSENPKLELENRLPDYPQYNHEFVQPLFVSRMPTRKMTGQGHMETVKSAKRLDEGLSVLKVPLTQLKLNDLERMVNREREMALYESLKVRLEQFDNDPAKAFAEPFYKKGGALVKAVRVEQTQKSGVLVRDGNGVADNASMVRVDVFTKAGKYFLVPIYTWQVAKGILPNKAVTANVDEIDWLEMDESYQFIFTMYPNDLVKVKLKKEEFFGYYGGLDRATGAIVIKEHDLEKSKGRQGIYRIGVKLALSFEKYQVDELGKNIRPCRPTKRQHVR

SEQ ID NO: 174 - protein, 1369 aa, Lactobacillus iners
MNNNYYLGLDLGTNSVGWAVTDDHYNIIKFHGKHMWGMRLFEEAETAKDRRLHRQARRRRQRLVERINLLEELFDKEISKVDQGFFARKKESDLHFEDKTTKSEYALFNDKSYTDRDYYKQYPTIFHLIMDLIENDKKRDIRLVYLACHYLIKHRGHFIFDGKNFTVDNSFENLLDKLITYLKDNDDITLSFPKDQLINIFKNSNLNSTEKSDQLKPFFGRTNLEKGIIKLLSGGKQDLSNMFRDETLKNSNYKNLKFSDNRFDDERDGYAADLGDRIDLLILLKQIYDASILESMMSQARVSIDGHKYISSAKVCAYEKHKSDLKRLKSLIKKYLPSEYNNIFRKITEKDNYVAYSKSNITNNKREKALKYVKYVDFTKYLTKKLKTIKTQDAEDDQEIFEIKGELEKQSFLPKQRTLDNSIIPYQLHLMELKKILDNQSKYYDFLLAKDDQEGITVKDKIISLLTFRLPYYIGPVNPAVHGKFAWVKRLANGKVTPWNYKEKIDIDASHEEFIKTKLSKCSFLIGCDVLPKNSLLYQKYMVLSELNTIKFNGVNISEKLKDDIYQNLFKNIQKVTKKRLQNYIKEHENIIGDVIVTGIDNAFKQGLVSYLKFKKIIGDKVDDDRYQKVLEKIIRDITLYDECAGKKIKKEYKDSDLFTEDELNKIVKLTFNDWGRLSAELLDQLEGEDTVSGETGKIIEFMQKHNYNLMQLMSKKFTFKSKIDEINKSYYQHDKFNYKSMIDSLYVSPATKRILWQSLKVVHEISKIMKHDPEKIFIEMARSKEDHPKRKLSRKADLKQVYKDSKKQIISIIGKDKYQDLSNELDNKDDRDLRWDNLYLYYTQLGRSMYSLKPIDISELMNKNLYDQDHIFPKSKKYDDSIENRVLVEKELNVKKSDIYPISDANIIPQKIKGQVESFWKMLYDHKLIGDKKYARLIRSKAFTDDELAGFIARQLVETRQATKETADLLKRLCPKSRIVYAKAQNASIFRQKFDIPKSRTINDLHHAQDAYLNIVVGNIFDTKFTQDPRNFIKNTKDSRNYNLEKIYDYNVERNNYVAWIAPDGETNGTIANVKCNLSTKDFRVTRPSFYKKGALFNQNLSRKGSNLAPIKEHSPKSNPLKYGGYSGKNNSFFVVVAGKDNKGKDIVKLIPVNTLIYNKMLHCDYKAKQELLTSYVANNFAINNFRIVKDDIKMYSLVKIDGAYYYLVGGTDERIEVKNAMQLLLSKDSIKAVKILEKESKDQFANIKNYKDIDIKLGRTFNEVVSKYTNSVFGKSMLISDKYRKDIFKSVEKSILEFNHLDTIGKADNLLKFVTLMRPSGSAHSLKMVGLIERIRKSNVISNFNEFKLINQSVTGLFENEEDLLKL

SEQ ID NO: 175 - protein, 1420 aa, Bifidobacterium bifidum
MSRKNYVDDYAISLDIGNASVGWSAFTPNYRLVRAKGHELIGVRLFDPADTAESRRMARTTRRRYSRRRWRLRLLDALFDQALSEIDPSFLARRKYSWVHPDDENNADCWYGSVLFDSNEQDKRFYEKYPTIYHLRKALMEDDSQHDIREIYLAIHHMVKYRGNFLVEGTLESSNAFKEDELLKLLGRITRYEMSEGEQNSDIEQDDENKLVAPANGQLADALCATRGSRSMRVDNALEALSAVNDLSREQRAIVKAIFAGLEGNKLDLAKIFVSKEFSSENKKILGIYFNKSDYEEKCVQIVDSGLLDDEEREFLDRMQGQYNAIALKQLLGRSTSVSDSKCASYDAHRANWNLIKLQLRTKENEKDINENYGILVGWKIDSGQRKSVRGESAYENMRKKANVFFKKMIETSDLSETDKNRLIHDIEEDKLFPIQRDSDNGVIPHQLHQNELKQIIKKQGKYYPFLLDAFEKDGKQINKIEGLLTFRVPYFVGPLVVPEDLQKSDNSENHWMVRKKKGEITPWNFDEMVDKDASGRKFIERLVGTDSYLLGEPTLPKNSLLYQEYEVLNELNNVRLSVRTGNHWNDKRRMRLGREEKTLLCQRLFMKGQTVTKRTAENLLRKEYGRTYELSGLSDESKFTSSLSTYGKMCRIFGEKYVNEHRDLMEKIVELQTVFEDKETLLHQLRQLEGISEADCALLVNTHYTGWGRLSRKLLTTKAGECKISDDFAPRKHSIIEIMRAEDRNLMEIITDKQLGFSDWIEQENLGAENGSSLMEVVDDLRVSPKVKRGIIQSIRLIDDISKAVGKRPSRIFLELADDIQPSGRTISRKSRLQDLYRNANLGKEFKGIADELNACSDKDLQDDRLFLYYTQLGKDMYTGEELDLDRLSSAYDIDHIIPQAVTQNDSIDNRVLVARAENARKTDSFTYMPQIADRMRNFWQILLDNGLISRVKFERLTRQNEFSEREKERFVQRSLVETRQIMKNVATLMRQRYGNSAAVIGLNAELTKEMHRYLGFSHKNRDINDYHHAQDALCVGIAGQFAANRGFFADGEVSDGAQNSYNQYLRDYLRGYREKLSAEDRKQGRAFGFIVGSMRSQDEQKRVNPRTGEVVWSEEDKDYLRKVMNYRKMLVTQKVGDDFGALYDETRYAATDPKGIKGIPFDGAKQDTSLYGGFSSAKPAYAVLIESKGKTRLVNVTMQEYSLLGDRPSDDELRKVLAKKKSEYAKANILLRHVPKMQLIRYGGGLMVIKSAGELNNAQQLWLPYEEYCYFDDLSQGKGSLEKDDLKKLLDSILGSVQCLYPWHRFTEEELADLHVAFDKLPEDEKKNVITGIVSALHADAKTANLSIVGMTGSWRRMNNKSGYTFSDEDEFIFQSPSGLFEKRVTVGELKRKAKKEVNSKYRTNEKRLPTLSGASQP

SEQ ID NO: 176 - protein, 1092 aa, Ilyobacter polytropus
MKYSIGLDIGIASVGWSVINKDKERIEDMGVRIFQKAENPKDGSSLASSRREKRGSRRRNRRKKHRLDRIKNILCESGLVKKNEIEKIYKNAYLKSPWELRAKSLEAKISNKEIAQILLHIAKRRGFKSFRKTDRNADDTGKLLSGIQENKKIMEEKGYLTIGDMVAKDPKFNTHVRNKAGSYLFSFSRKLLEDEVRKIQAKQKELGNTHFTDDVLEKYIEVFNSQRNFDEGPSKPSPYYSEIGQIAKMIGNCTFESSEKRTAKNTWSGERFVFLQKLNNFRIVGLSGKRPLTEEERDIVEKEVYLKKEVRYEKLRKILYLKEEERFGDLNYSKDEKQDKKTEKTKFISLIGNYTIKKLNLSEKLKSEIEEDKSKLDKIIEILTFNKSDKTIESNLKKLELSREDIEILLSEEFSGTLNLSLKAIKKILPYLEKGLSYNEACEKADYDYKNNGIKFKRGELLPVVDKDLIANPVVLRAISQTRKVVNAIIRKYGTPHTIHVEVARDLAKSYDDRQTIIKENKKRELENEKTKKFISEEFGIKNVKGKLLLKYRLYQEQEGRCAYSRKELSLSEVILDESMTDIDHIIPYSRSMDDSYSNKVLVLSGENRKKSNLLPKEYFDRQGRDWDTFVLNVKAMKIHPRKKSNLLKEKFTREDNKDWKSRALNDTRYISRFVANYLENALEYRDDSPKKRVFMIPGQLTAQLRARWRLNKVRENGDLHHALDAAVVAVTDQKAINNISNISRYKELKNCKDVIPSIEYHADEETGEVYFEEVKDTRFPMPWSGFDLELQKRLESENPREEFYNLLSDKRYLGWFNYEEGFIEKLRPVFVSRMPNRGVKGQAHQETIRSSKKISNQIAVSKKPLNSIKLKDLEKMQGRDTDRKLYEALKNRLEEYDDKPEKAFAEPFYKPTNSGKRGPLVRGIKVEEKQNVGVYVNGGQASNGSMVRIDVFRKNGKFYTVPIYVHQTLLKELPNRAINGKPYKDWDLIDGSFEFLYSFYPNDLIEIEFGKSKSIKNDNKLTKTEIPEVNLSEVLGYYRGMDTSTGAATIDTQDGKIQMRIGIKTVKNIKKYQVDVLGNVYKVKREKRQTF

SEQ ID NO: 177 - protein, 994 aa, Streptococcus downei
MENQRGKRQRITHQEPYSIGLDIGTASVGSAVINNDLTVPQKRFKVRDINGNVIKTIKKNMSSVLIFDEANPAKGARTKRTSRRRYTRRNFRLLELKKLFEKEIEKIDPNFFHRIKEDSFFNWNDKEFDKHPLFGNLKEEKKFHNNYPTVFHLRNEIGKNSSKKFDLRLVYLALAHIIKYRGHFLDETFDPDASVSVEKRLNDFIVEYNELFDKDLRSEAKFSEILMSDSSNSVKIESTLSLYPSEKNTIFQVFLKLIVGNQGDFNKFFKDELESSSHSGKLVFSSDEVEDEKEELISIIGEDYLDIINLCQSLYSTVALAKIISTDTGESNTPLSASMVKRYNEHKGDLANLKGIVKHFIPEKYEEVFGEHSKTGYTAYIRNPNKMPEKKFYDYLYHEGEKGKISGILSDSRIYELPAVQKFILKIEQKSFLKKQRTKENGLIPYQLHLKELKIIIENQSEYYPFLHEIEEKLEKLLTFRIPYFVGPLAQTKYINPRFNWLVRKSEDHIKPWNFSEIVDEEKSATKFIEKLISNDQFLFGEKVLPKRSIIYQQFLIFNELTKVSYQIKDGPSRNFDSETKEEIFNSLFKKNKLGCVTVVDLKNYIKNDQCLSEKEDIQIEGIKKKFNSSYSTYADLSEISGLKELLDDDTQLDLVEEIIRILTVFEDKKMRTKQLEKLNLPANVDIEKLCKKHYKGWANVSRQLIDGIADRSRGFKKTILDYLKDDDIPNNDAFSTKVQKSLNRNFAQLITDKSLDFARKLDESYKIDVKKDYPSLVEDIPGSPAIRRAILQSLYTVDEIIGVMGRMPKNIVIEMARTNEVSDSPKTRKERIKKLIKETENDADALNFGISKVSEIFDEVKKDENLFKELEVYLYFLQEGKDMYGTETREGHRQPKEINFYDVKNSTGKYHIDHIIPQSLYSGNPLDNIVLTESTNNKIKDKDVPDEATVYEMKNFWLYLMKKGAISKKKFSFLTKIEQGGLSNEDKFGFINR

SEQ ID NO: 178 - protein, 1052 aa, Aminomonas paucivorans
MIGEHVRGGCLFDDHWTPNWGAFRLPNTVRTFTKAENPKDGSSLAEPRRQARGLRRRLRRKTQRLEDLRRLLAKEGVLSLSDLETLFRETPAKDPYQLRAEGLDRPLSFPEWVRVLYHITKHRGFQSNRRNPVEDGQERSRQEEEGKLLSGVGENERLLREGGYRTAGEMLARDPKFQDHRRNRAGDYSHTLSRSLLLEEARRLFQSQRTLGNPHASSNLEEAFLHLVAFQNPFASGEDIRNKAGHCSLEPDQIRAPRRSASAETFMLLQKTGNLRLIHRRTGEERPLTDKEREQIHLLAWKQEKVTHKTLRRHLEIPEEWLFTGLPYHRSGDKAEEKLFVHLAGIHEIRKALDKGPDPAVWDTLRSRRDLLDSIADTLTFYKNEDEILPRLESLGLSPENARALAPLSFSGTAHLSLSALGKLLPHLEEGKSYTQARADAGYAAPPPDRHPKLPPLEEADWRNPVVFRALTQTRKVVNALVRRYGPPWCIHLETARELSQPAKVRRRIETEQQANEKKKQQAEREFLDIVGTAPGPGDLLKMRLWREQGGFCPYCEEYLNPTRLAEPGYAEMDHILPYSRSLDNGWHNRVLVHGKDNRDKGNRTPFEAFGGDTARWDRLVAWVQASHLSAPKKRNLLREDFGEEAERELKDRNLTDTRFITKTAATLLRDRLTFHPEAPKDPVMTLNGRLTAFLRKQWGLHKNRKNGDLHHALDAAVLAVASRSFVYRLSSHNAAWGELPRGREAENGFSLPYPAFRSEVLARLCPTREEILLRLDQGGVGYDEAFRNGLRPVFVSRAPSRRLRGKAHMETLRSPKWKDHPEGPRTASRIPLKDLNLEKLERMVGKDRDRKLYEALRERLAAFGGNGKKAFVAPFRKPCRSGEGPLVRSLRIFDSGYSGVELRDGGEVYAVADHESMVRVDVYAKKNRFYLVPVYVADVARGIVKNRAIVAHKSEEEWDLVDGSFDFRFSLFPGDLVEIEKKDGAYLGYYKSCHRGDGRLLLDRHDRMPRESDCGTFYVSTRKDVLSMSKYQVDPLGEIRLVGSEKPPFVL

SEQ ID NO: 179 - protein, 1023 aa, Helicobacter cinaedi
MKIYSFDIGVASIGWAFIENEVLQDCGIRIFTKAENPKNGASLALPRREARGVRKRLARRRGRLNTIKQLLCKEFGLQLEDYLSNDGELPKAYTASKANPLKSPYELRTLALSQKLDSKDLVRVILHIAKHRGYGNKHAKDSKDTESGKVKKAIEFNRKTLAEKGYRSVGEYLYREFFQQSRISQNNGATEFINVRNKAGNYEHCVAQDMLKEELESILNAQRQFGFSLKQDFENKLLTKIFEQRPLKSFADKVGNCCFIAGEKRAPKDSPSAIEFIALSRTINTLINLSKESGEIYNRAIILQIVESTLKKGEISYKELREIIRLDERLRFKDPRLDYSREIKEAEKVKFLEFKQLKGFKKALGESFTTLAISQLDEIAEHIALIKDRVKLNEKLESYALTKEQREALSNLSFSAHINLSLQALKQILPFMRGDNGEQCLDYDESVEKAGLKALSKDTLKGQMLPPLNEFEPYLSNPVVARALAEYRKVLNVLLKQYGSPHKIHIEYAREAKLSSTERQKYEKEQKDNYAANQAAHKKCQELGLEPSSTNLLKLKLWQEQGGLCLYSGAKITISYLQDPTALQVDHIYPYSRSFDDSYMNKCLVLTKANQEKGNRTPFEAFGTDSAKWGVITTLAQKLPHKKRRRILNTAFNDKEAGFKLRNLNDTSYIARLVADYTETYLEFLPLVESENTTLSKGQKGSKKHIAIVNGVLTSTMRYYLGFASKDRDNHLHHALDAVIIGFMNDSVIKAFSDFKKTQETSKAAYYAHTLSKQEYKKQRAFIQLPSGENFRVSVLEKVESVFVSKPPRKRVRGALHEATFYSPNDPKLLKNYGGTKGVERALALGKMRKVGAKIVSNGAMVRVDIFRHKSSGKFYGVPVYTMDFALGILPNKAVVVGKDQNGVIKDWLEMDSSYEFIFSLYKDDVILVQKKEMQRPELCYFVSFDTSGASIKVAKHDNNFSTLTENQKLLFSNATKEEVVGKSIGIQNLKVFEKWQVSVLGEVKRTQSYPRENISLASKAKK

SEQ ID NO: 180 - protein, 874 aa, Listeria seeligeri
LANGQSEFSWLTRKADGEIRPWNIEEKVDFGKSAIDFIEKMTNKDTYLPKENVLPKHSMCYQKYMVYNELTKIRYTDDQGKTHYFSGQEKQQIFNDLFKQKRKVKKKDLELFLYNMNHVESPTVEGVEDAFNSSFTTYHDLQKVGVPQEILDDPLNTEMLEEIIKILTVFEDKRMINERLQEFSNVLDEAVLKKLERRHYTGWGRLSAKLLIGIRDKESHLTILDYLMNDDKHNRNLMQLINDSNLSFKSIIEKEQVSTADKDIQSIVADLAGSPAIKKGILQSLKIVDELVGIMGYPPQTIVVEMARENQTTGKGKNNSKPRFTSLEKAIKELGSQILKEHPTDNQGLKNDRLYLYYLQNGKDMYTGQELDIHNLSNYDIDHVVPQSFITDNSIDNRVLASSAANREKGDNVPSLEVVRKRKVYWEKLYQAKLMSKRKFDYLTKAERGGLTEADKARFIHRQLVETRQITKNVANILHQRFNCKKDESGNVIEQVRIVTLKAALVSQFRKQFQLYKVREVNDYHHAHDAYLNCVVANTLLKVYPQLEPEFVYGDYHQFDWFKANKATAKKQFYTNIMLFFAKKDRIIDENGEILWDKKYLDTIKKVLNYRQMNIVKKTEIQKGEFSNATANPKGNSSKLIPRKADWDPIKYGGFDGSNMAYAIVIEHEKRKKKTVIKKELIQINIMERTAFEKDQKEFLEGKGYRNPKVITKIPKYTLYECENGRRRMLGSANEAQKGNQMVLPNHLMTLLYHAKNCEASDGKSLAYIESHREMFAELLDSISEFASRYTLADANLEKINTIFEQNKSGDVKVIAQSFVNLLEFNAMGAPASFKYFETNIERKRYNNLKELLNATIIYQSITGLYEARKRLDD

SEQ ID NO: 181 - protein, 1082 aa, Neisseria lactamica
MAAFKPNPMNYILGLDIGIASVGWAMVEIDKEENPIRLIDLGVRVFERAEVPKTGDSLAMARRLARSVRRLTRRRAHRLLRARRLLKREGVLQDADFDENGLVKSLPNTPWQLRAAALDRKLTCLEWSAVLLHLIKHRGYLSQRKNEGETADKELGALLKGVADNAHALQTGDFRTPAELALNKFEKESGHIRNQRGDYSHTFSRKDLQAELNLLFEKQKEFSNPHVSDSLKEGIETLLMAQRPALSGDAVQKMLGHCTFEPAEPKAAKNTYTAERFIWLTKLNNLRILEQGSERPLTDTERATLMDEPYRKSKLTYAQARKLLGLEDTAFFKGLRYGKDNAEAPTLMEMKAYHAISRALEKEGLKDKKSPLNLSTELQDEIGTAFSLFKTDKDITGRLKDRVQPEILEALLKHISFDKFVQISLKALRRIVPLMEQGKRYDEACAEIYGDHYCKKNAEEKIYLPPIPADEIRNPVVLRALSQARKVINCVVRRYGSPARIHIETAREVGKSFKDRKEIEKRQEENRKDREKAAAKFREYFPNFVGEPKSKDILKLRLYEQQHGKCLYSGKEINLVRLNEKGYVEIDHALPFSRTWDDSFNNKVLVLGSENQNKGNQTPYEYFNGKDNSREWQEFKARVETSRFPRSKKQRILLQKFDEEGFKERNLNDTRYVNRFLCQFVADHILLTGKGKRRVFASNGQITNLLRGFWGLRKVRAENDRHHALDAVVVACSTVAMQQKITRFVRYKEMNAFDGKTIDKETGEVLHQKAHFPQPWEFFAQEVMIRVFGKPDGKPEFEEADTPEKLRTLLAEKLSSRPEAVHEYVTPLFVSRAPNRKMSGQGHMETVKSAKRLDEGISVLRVPLTQLKLKGLEKMVNREREPKLYDALKAQLETHKDNPAKAFAEPFYKYDKAGNRTQQVKAVRIEQVQKTGVWVRNHNGIADNATMVRVDVFEKGGKYYLVPIYSWQVAKGILPDRAVVAFKDEEDWTVMDDSFEFRFVLYANDLIKLTAKKNEFLGYFVSLNRATGAIDIRTHDTDSTKGKNGIFQSVGVKTALSFQKNQIDELGKEIRPCRLKKRPPVR

SEQ ID NO: 182 - protein, 1326 aa, Streptococcus pseudoporcinus
MLGTVLFDSGETAQARRLKRTNRRRYTRRRYRLCQLQNIFATEMVKVDDTFFQRLSESFFYYQDKAFDKHPIFGNSKEERAYHKTYPTIYHLRKDLADRDQKADLRLIYLALSHIIKFRGHFLIEGKLNSENTDVQKLFIALVTVYNLLFEEEPIAGETCDAKALLTAKTSKSKRLESLISEFPGQKKNGLFGNLLALALGLRPNFKSNFGLSEDAKLQITKDTYEEELDNLLAEIGDHYADLFLAAKNLSDAILLSDILTLSDENTRAPLSASMIKRYEEHQEDLALLKKLVKEQMPEKYWEIFSNAKKNGYAGYIEGKVSQEDFYRYIKPILSRLKGGDEFLAKIDRDDFLRKQRTFDNGSIPHQIHLKELHAILRRQEKYYPFLAEQKEKIEQLLCFRIPYYVGPLAKGGNSSFAWLKRRSDEPITPWNFKDVVDEEASAQAFIEGMTNYDTYLPEEKVLPKHSPLYEMFTVYNELTKVKYIAENMTKPLYLSAEQKEAIIDHLFKQTRKVTVKDLKEKYFSQIEGLENVDVTGVEGAFNASLGTYNDLLKIIKDKAFLDDEANAEILEEIVLILTLFQDEKLIEKRLAKYANLFEKSVLKKLRKRHYRGWGRLSRQLIDGMKDKASGKTILDFLKADDFANRNFIQLINDSSLDFEKLIDDAQKKAIKRESLTEAVANLAGSPAIKKGILQSLKVVDEIVKVMGHNPDNIVIEMSRENQTTAQGLKNARQRLKKIKEVHKKTGSRILEDNSERITNLTLQDNRLYLYLLQDGKDMYTGQDLDINNLSQYDIDHIIPQSFIKDNSIDNLVLTTQKANRGKSDNVPSIEVVRDMKDRVWRRQLANGAISRQKFDHLTKAERGGLADSDKARFLRRQLVETRQITKHVAQLLDSRFNSKSNQNKKLARNVKIITLKSKIVSDFRKDFGLYKLREVNNYHHAHDAYLNAVVGTALLKKYPKLEAEFVYGDYKHFDLVKLISKSDPSLGKATAKVFFYSNIMNFFKEELSLADGTLMKRPVIETNTETGEVVWDKVKDFKTIRKVLSYPQVNIVKKTEIQSGAFSKESVLSKGNSDKLIERKKGWDPKKYGGFDSPNTAYSIFVVAKVAKRKAQKLKTVKEIVGITIMEQAEYEKDNIAFLEKKGYQDIQEKLLIKLPKYSLFELENGRRRLLASANEFQKGNELALSGKYMKFLYLASRYDKLSSKIESEQQKKLFVEQHLHYFDEILDIVVKHATCYIKAENNLKKIISLYKKKEAYSINEQALNMLNLFIFTSLGAPSTFVFFDETIDRKRYTTSSDVLNGILIQQSITGLYETRIDLSRFGGD

SEQ ID NO: 183 - protein, 1150 aa, Enterococcus faecalis
MYSIGLDLGISSVGWSVIDERTGNVIDLGVRLFSAKNSEKNLERRTNRGGRRLIRRKTNRLKDAKKILAAVGFYEDKSLKNSCPYQLRVKGLTEPLSRGEIYKVTLHILKKRGISYLDEVDTEAAKESQDYKEQVRKNAQLLTKYTPGQIQLQRLKENNRVKTGINAQGNYQLNVFKVSAYANELATILKTQQAFYPNELTDDWIALFVQPGIAEEAGLIYRKRPYYHGPGNEANNSPYGRWSDFQKTGEPATNIFDKLIGKDFQGELRASGLSLSAQQYNLLNDLTNLKIDGEVPLSSEQKEYILTELMTKEFTRFGVNDVVKLLGVKKERLSGWRLDKKGKPEIHTLKGYRNWRKIFAEAGIDLATLPTETIDCLAKVLTLNTEREGIENTLAFELPELSESVKLLVLDRYKELSQSISTQSWHRFSLKTLHLLIPELMNATSEQNTLLEQFQLKSDVRKRYSEYKKLPTKDVLAEIYNPTVNKTVSQAFKVIDALLVKYGKEQIRYITIEMPRDDNEEDEKKRIKELHAKNSQRKNDSQSYFMQKSGWSQEKFQTTIQKNRRFLAKLLYYYEQDGICAYTGLPISPELLVSDSTEIDHIIPISISLDDSINNKVLVLSKANQVKGQQTPYDAWMDGSFKKINGKFSNWDDYQKWVESRHFSHKKENNLLETRNIFDSEQVEKFLARNLNDTRYASRLVLNTLQSFFTNQETKVRVVNGSFTHTLRKKWGADLDKTRETHHHHAVDATLCAVTSFVKVSRYHYAVKEETGEKVMREIDFETGEIVNEMSYWEFKKSKKYERKTYQVKWPNFREQLKPVNLHPRIKFSHQVDRKANRKLSDATIYSVREKTEVKTLKSGKQKITTDEYTIGKIKDIYTLDGWEAFKKKQDKLLMKDLDEKTYERLLSIAETTPDFQEVEEKNGKVKRVKRSPFAVYCEENDIPAIQKYAKKNNGPLIRSLKYYDGKLNKHINITKDSQGRPVEKTKNGRKVTLQSLKPYRYDIYQDLETKAYYTVQLYYSDLRFVEGKYGITEKEYMKKVAEQTKGQVVRFCFSLQKNDGLEIEWKDSQRYDVRFYNFQSANSINFKGLEQEMMPAENQFKQKPYNNGAINLNIAKYGKEGKKLRKFNTDILGKKHYLFYEKEPKNIIK

SEQ ID NO: 184 - protein, 1150 aa, Enterococcus faecalis
MYSIGLDLGVSSVGWSVIDERTGNVIDLGVRLFSAKNSEKNLERRTNRGGRRLIRRKTNRLKDAKKILAAVGFYEDKSLKNSCPYQLRVKGLTEPLSKGEIYKVTLHILKKRGISYLDEDDTEAAKESQDYKEQVRENAQLLTKYTPGQIQLQRLKENNRVKTGINAQGNYQLNVFKVSAYANELATILKTQQAFYPNELTDDWIALFVQPGIAEEAGLIYRKRPYYHGPGNEANNSPYGRWSDFKKTGQPATNIFDKLIGKDFQGELRASGLSLSAQQYNLLNDLTNLKIDGEIPLSPEQKEYILAELMTKEFTRFGINDVAKLLGVKKERLSGWRLDKKGKPEIHTLKGYRNWRKIFAESGIDLATLPTETIDCLAKVLTLNTEREGIENTLAFELPELAESVKLLVLDRYKELSQSVSTQAWHRFSLKTLHLLIPELMNATSEQNTLLEQFQLKSDVRKRYSEYKKLPTKDVLTEIYNPTVNKTVSQAFKVIDALLVKYGKEQIRYITIEMPRDDNEEDEKKRIKELHAKNSQRKNDSQSYFMQKSGWSQEKFQTTIQKNRRFLAKLLYYYEQDGICAYTGLSISPELLVSDSTEIDHIIPISISLDDSINNKVLVLSKANQVKGQQTPYDAWMDGSFKKINGKFSNWDDYQKWVESRHFSHKKENNLLETRNIFDSEQVEKFLARNLNDTRYASRLVLNTLQSFFANQETKVRVVNGSFTHTLRKKWGADLDKTRETHHHHAVDATLCAVTPFVKVSRYHYAVKEETGEKVMREIDFETGEIVDEMSYREFKKSKKYERKTYQVKWPNFREQLKPVNLHPRIKFSHQVDRKANRKLSDATIYSVREKTEVKTLKSGKQKITTDEYTIGKIKDIYTVDGWEAFKKKQDKLLMKDLDEKTYERLLSIAETTPDFQEVEEKNGKVKRVKRSPFAVYCEENDIPAIRKYAKNNNGPLIRSLKYYDGKLNKHINITKDSQGRPVEKTKNGRKVTLQSLKPYRYDIYQDLETKAYYTVQLYYSDLRFVEGKYGITEKEYMKKVAEQTKGQVVRFCFSLQKNDGLEIEWKDSQCYDVRFYNFQSANSINFKGLEQEMMPAENQFKQKPYNNGAINLNIAKYGKEGKKLRKFNTDILGKKHYLYYEKEPKNIIK

SEQ ID NO: 185 - protein, 1345 aa, Streptococcus anginosus
MDQKYSIGLDIGTNSVGWAVVTDDYKVPAKKMKVLGNTDKQSIKKNLLGALLFDSGETAEATRLKRTARRRYTRRRNRLRYLQEIFAEEMNKVDENFFQRLDDSFLVDEDKRGERHPIFGNIAAEVKYHDDFPTIYHLRKHLADISQKADLRLVYLALAHMIKFRGHFLIEGQLKAENTNVQALFKDFVEVYDKTVEESHLSEMTVDALSILTEKVSKSRRLENLIAHYPAEKKNTLFGNLIALSLGLQPNFKTNFQLSEDAKLQFSKDTYEEDLEGLLGEIGDEYADLFASAKNLYDAILLSGILTVDDNSTKAPLSASMVKRYEEHQKDLKKLKDFIKVNAPDQYNAIFKDKNKKGYAGYIENGVKQDEFYKYLKGILLQINGSGDFLDKIDREDFLRKQRTFDNGSIPHQIHLQEMHAILRRQEEHYPFLKENQDKIEKILTFRIPYYVGPLARKGSRFAWAEYKADEKITPWNFDDILDKEKSAEKFITRMTLNDLYLPEEKVLPKHSLLYETFTVYNELTKVKYVNEQGEAKFFDANMKQEIFDHVFKENRKVTKDKLLNYLNKEFEEFRIVNLTGLDKENKAFNSSLGTYHDLRKILDKSFLDDKANEKTIEDIIQTLTLFEDREMIRQRLQKYSDIFTKAQLKKLERRHYTGWGRLSYKLINGIRNKENKKTILDYLIDDGYANRNFMQLINDDALSFKEEIARAQIIGDVDDIANVVHDLPGSPAIKKGILQSVKIVDELVKVMGHNPANIIIEMARENQMTDKGRRNSQQRLKLLQDSLKNLDNPVNIKNVENQQLQNDRLFLYYIQNGKDMYTGETLDINNLSQYDIDHIIPQAFIKDNSLDNRVLTRSDKNRGKSDDVPSIEVVHEMKSFWSKLLSVKLITQRKFDNLTKAERGGLTEEDKAGFIKRQLVETRQITKHVAQILDERFNTEFDGNKRRIRNVKIITLKSNLVSNFRKEFELYKVREINDYHHAHDAYLNAVVGNALLLKYPQLEPEFVYGEYPKYNSYRSRKSATEKFLFYSNILRFFKKEDIQTNEDGEIAWNKEKHIKILRKVLSYPQVNIVKKTEEQTGGFSKESILPKGESDKLIPRKTKNSYWNPKKYGGFDSPVVAYSILVFADVEKGKSKKLRKVQDMVGITIMEKKRFEKHPVDFLEQRGYRNVRLEKIIKLPKYSLFELENKRRRLLASARELQKGNELVIPQRFTTLLYHSYQIEKNYEPEHREYVEKHKDEFKELLEYISVFSRKYVLADNNLTKIEMLFSKNKDAEVSSLAKSFISLLTFTAFGAPAAFNFFGENIDRKRYTSVTECLNATLIHQSITGLYETRIDLSKLGED

SEQ ID NO: 186 - protein, 849 aa, Listeria ivanovii
LIDKNGTPQHITMIDKMRGKCTYFPEEVRIAKMSYTAELFGLLNDFNNIYFADPETGEKIGFTEADKKYFIDTFIHDQKGVKNITLKQIMKHKNIINETDIFGYRINTKNGTPIFTEFKGLKALKKALKEVDLPDEFYQNTEMMDEIANILSSEKSFTRREEQLKELFLAAFNDELEEAVKELINDITFKEFHSLSKKAIMVILPELWSTNQNQMQLFVQHKMDKSRLENLQNGTKIQFDDEAILSTIAKRAHRETIKIVDAVRAKYGELDYVIVEMAREKNSDEQKKVYNRAQKKQGDFEKEMCKLLGVSELKELRLNGKQHLALKFWKEQDGKCIYSGKPIALSDIVNNFNGLLEIDHIIPISISYDDSQQNKVLCLRSENQRKGQLSPYQYLIRGMGERSFDAFKAEVLSRHFGKKKQNYLLEMEDIANNDELRKHFINRNLVDTRYAMRTFSNTLKTFYTVNGIPTKVMPVNGAMTSALRKRAKLNKDRDAGHAHHAIDALIVAAIGRLPLIKQLAELRVNEEGEFADKITDKGLDDKTAFDDKTLKFLRNLLNYESKVKYSHKVDRKPNRSLSKQTLYSTREKDGEKYIIGKVKNIYTLDKAGYAALKKRIDKNPEDFLMAQHNPKTWEEIIKIMEVYSKADNPFKEFYDEHGFIMKDGKVPVKSLRYHDKKLGIHVPLTHKYENTRHDVVLLKRNSLRVDIYMNKEGVYKYQGVPYNWFNQKGDKYILDMEKYHNEIDGTRASFKNIDNTFEFQFSLYKNDVFSYMKKDKEGEXVSYTKLFRSDSSPRENRLEVENIDMRTSSQQMPTINPLKNLIKYNTDILGNTYPIQKEKFVTVFTLHSK

SEQ ID NO: 187 - protein, 1457 aa, Prevotella buccae
MKTILGLDLGTNSIGWAKVSVDDYGNYLHDIKLGSRIIPMSQDVLGNFDSGVTVSQTAQRTEFRSKRRLVQRNLQRRERLHRVLHVLDFLPAHYDAAIGWDRTEAVTYGKFLNHAEPKLAWEELGNGKRRFLFMDSFHEMVADFARCQPALVADGKKIPLDWTIYYLRKKALTQAITKEELAWILLNFNQKRGYYQLRGEEEEENPTKQEEYYELKVVSVEATDSRKGNDTWYNVHLENGWIYRRSSKISLDDWVGKVKQFIVTTEYEKDGATLKTDKEGYVKRSFRAPNENDWGLRKKRTETLLEMSGKTVGAFIYDHLLQEPADKIRGNFIRTIERHYYKAELEAILAEQCKYHIELRDKEMLEACARELYLNNLPHQRSLMKKDMTYLLLYDLIFYQRPLKSKKALIANCPYEYYEYVDKETGEIKRQNIKCIAKSNPYFQEFRLWQFVLNLRLFDRVEDKEVTANYLPTADDHARLFTYLNDRKEINQETLLKDYFKLKKVKIGNEKEYPIRWNYIEDKEKKYPCNETRYELLMALDRAGIEHKWLDDNNLEYRLWHLLYSVEVKSESETALRKLKNDDAFVNSFLKVKPFKKEYGAYSEKAIKRLLAVMRKGFLWNEQDICDETRKRIEIIIKGDVDEKVKERMGHAAYSFDRVSDFQGLPEWLACYVVYGRHSEAMDIQHWDSPERLMAYINNFKQYSLRNPIVEQCILETLRTVHDIWKETGQIDEIHVELGREMKSTSEERARRTQNVLRNENTNLRIKSLLIELKNDTDICNVHPYSPMQQEILRIYEEGALQELNREDEDFEEISKISQMSQPSGKELNRYKLWLEQKYRSPYTGKAISLAKLFTPAYQIEHVIPQSRYFDDSFTNKVICEAEVNTLKSNLLGYEFIKKHGGEIIHCTTLGDVRIFSESEYKAFVMDHYANNKSKKDKLLMEDIPQEFLSRQMNDSRYISKVVKTLLSNIVRMADESEATSKSVIVCTGGVTDRLKKDWGLNDVWNSIVYSRFERLNRLTGTEAFGHWENKDGKRVFQTSMPLELQRGFRKKRIDHRHHAMDALVIACASRNIVNYLNNESANNPKKREDLRRQLCDKNRVIRKPWETFTQDAYNALENVVVSFKNYVRVINKATNRYEHYDENGKKRFVQQKGSELWAIRKPMHKETYYGHVNLRRKELVTLQKALDDIPSICDKKLRDYISALVEKHFNKRQLLAHFKSTDYYWQKQYVNKVYVWTFSDDIKPLVATRKLLDTSFDAKRIGTITDTGIQKILRNYLEAKGGNATLAFTPEGIAEMNQNISKYNDGKPHQPILKVRITEPMGAKYRVGQTGNKMAKYVEAQSGTNLYFAIYEDSEGKRSYTTVPLDEVAERLKQRLSPVPEKDENDVPLKFYLSPNDLVYVPTEEELQLRECKLNKDRIYKMVSSTGNECHFIPYYVANVIYNKGGFNMQMHRPQS

SEQ ID NO: 188 - protein, 1330 aa, Enterococcus italicus
MKNDYTIGLDIGTNSVGYSVVTDDYKVISKKMNVFGNTEKKSIKKNFWGVRLFESGQTAQEARMKRTSRRRIARRKNRICYLQEIFQPEMNHLDNNFFYRLNESFLVADDAKYDKHPIFGTLDEEIHFHEQFPTIYHLRKYLADGDEKADLRLVYLAIAHIIKFRGNFLIEGELNTENNSVIELSKVFVQLYNQTLSELEGFQFIDESIDFSEVLTQQLSKSERADNVLKLFPDEKGTGIFAQFIKLIVGNQGNFKKVFQLEEDQKLQLSTDDYEENIENLLAIIGDEYGDIFVAAQNLYQAILLAGILTSTEKTRAKLSASMIQRYEEHAKDLKLLKRFVKEHIPDKYAEIFNDATKNGYAGYIDGKTKEEEFYKYLKTTLVQKSGYQYFIEKIEQENFLRKQRIYDNGVIPHQVHAEELRAILRKQEKYYSFLKENHEKIEQIFKVRIPYYVGPLAKHNEQSRFAWNIRKSDEPIRPWNMNDVVDENASAVAFIERMTIKDIYLNENVLPRHSLIYEKFTVFNELTKVLYADDRGVFQRFSAEEKEDIFEKLFKSERKVTKKKLENYLRIELSISSPSVKGIEEQFNANFGTYLDLKKFDELHPYLDDEKYQDTLEEVIKVLTVFEDRSMIQNQLEQLPLNLSTKTIKALSRRKYTGWGRLSARLIDGIHDKNSGKTILDYLIEDESDSYIVNRNFMQLINDDHLSFKKIIEDSQPYKEQQSAEEIVSELSGSPAIKKGILQSLKIVDELVAIMGYKPKNIVVEMARENQTTGRGKQNSKPRLKGIENGLKEFSDSVLKGSSIDNKQLQNDRLYLYYLQNGKDMYTGHELDIDHLSTYDIDHIIPQSFLTDNSIDNRVLTTSKSNRGKSDNVPSEEVVRKMDRFWRKLLNAKLISERKYTNLTKKELTESDKAGFLKRQLVETRQITKHVATILDSKFNEDSNNRDVQIITLKSALVSEFRKTFNLYKVREINDLHHAHDAYLNAVVALSLLRVYPQLKPEFVYGEYGKNSIHDQNKATIKKQFYSNITRYFASKDYIINDDGEILWNKQETIAQVIKTLGMHQVNVVKKVEIQKGGFSKESIQPKGESQKLIRRKQQWNTKKYGGFDSPVVAYAILLSFDKGKRKARSFKIVGITIQDRESFEGNPILYLSKKDYHNPKVEAILPKYSLFEFENGRRRMVASASETQKGNQLIIPGHLMELLYHSKKIINGKNSDSVSYIQNNKEKFREIFEYIVDFSSKYISADANLNKIEKIFENNFHKASEQEIAKSFINLLTFTAMGAPADFEFFGEKIPRKRYVSISEIIDAVFIHQSITGLYETRVRLTEV

SEQ ID NO: 189 - protein, 1123 aa, Mobiluncus curtisii
MFVYLNSPRGFGPATFLTDLPHFCIIFGNNDFMDNRKYHVGIDVGTNSVGFAAVEVGDSGSPIRFLNTMVVIHDSGVDPEQKKYAITRLASAGTARRTRRLYRTRRQRLRELDDFISNELGYPLVNLENFADPYEPWKVRADLATIKLPADELPEAMSIALRHMARHRGWRSPYQRVEALHLHAEISEEFSALKKRVMEKTGDVFSDDATPAEVLVDLMGRQKIRGADGMLSGKLRQSDNANELRKIASVQGIDDETLNRIIDRVFFSRSPKGKASERVGMDALPGQGSKPRALKAMPSFQKFRIVSVICNLRIKDSGDDNRPLSMEEKEQLIGYLMSSTTDDHVTWTDVAELLHVKRSNLQGTAKEGPDGERPYTRPPVNSAWSKIKDSKIKSLVALWKTGDVDVQSAIVEALSNASVLEDARPGADIVVAYLESLDDKELESLDKVGLPAGRASYSEDSLERLTERMLQDDCDLFEARKREFGVSDDWKPPADPIYAPVGNPGVDRVLKIVNRLLMAAEREWGAPTQINIEHVRSGFSSELMQREFERENERRRAQNEEAVKAILTEKGGNSHVSKYDIIRYYAVKRQNCQCLYCGTPITFSDCELDHIVPRKGVGSTNSRVNLAAACRSCNRDKSNLPFAVWAGKTSNFDVSIDGAVSRVKQWQRSQNEGAREFRAFQNEVISRLLKTTEDPEIDSRSLESVAWMARELHHRVEYYFQSKGAQTQVSVYRGAVTAQARKSSGLEDKVKMIGGGGKTRLDRRHHAMDAATIALMTPGISTTLSEKNNLRDAQKFTGQSETWKDYCGRTETAREHFAVWKSNMERLTDLFNDKLENDAIPVVQPLRLRLSDSKAHDDGIGKLDSKKLGSVWSLADIDRAATPQIWTALTRCDDFDPTKGLPENANRVIRAQGVKYESEDNIPVFPSNVAAIAVRDGYAEIGSTIHHARIYRIDDGKKIFYSMIRVFAVDLLKHQAEDLFTVKLPPSAISIRTCEDSLRRALSNGTAEYLGWLVPGDEIIVDTSDKAFHTGQIGDLLRNFPVNSFRLTGFPSNSRLRLKPVLLAGEGLRDDAEDSIKKILSGQGWRPAINVLFSKGKPRIVRRNSLGIERPSSNNGLPFSWEA

SEQ ID NO: 190 - protein, 1054 aa, Staphylococcus lugdunensis
MNQKFILGLDIGITSVGYGLIDYETKNIIDAGVRLFPEANVENNEGRRSKRGSRRLKRRRIHRLERVKKLLEDYNLLDQSQIPQSTNPYAIRVKGLSEALSKDELVIALLHIAKRRGIHKIDVIDSNDDVGNELSTKEQLNKNSKLLKDKFVCQIQLERMNEGQVRGEKNRFKTADIIKEIIQLLNVQKNFHQLDENFINKYIELVEMRREYFEGPGKGSPYGWEGDPKAWYETLMGHCTYFPDELRSVKYAYSADLFNALNDLNNLVIQRDGLSKLEYHEKYHIIENVFKQKKKPTLKQIANEINVNPEDIKGYRITKSGKPQFTEFKLYHDLKSVLFDQSILENEDVLDQIAEILTIYQDKDSIKSKLTELDILLNEEDKENIAQLTGYTGTHRLSLKCIRLVLEEQWYSSRNQMEIFTHLNIKPKKINLTAANKIPKAMIDEFILSPVVKRTFGQAINLINKIIEKYGVPEDIIIELARENNSKDKQKFINEMQKKNENTRKRINEIIGKYGNQNAKRLVEKIRLHDEQEGKCLYSLESIPLEDLLNNPNHYEVDHIIPRSVSFDNSYHNKVLVKQSENSKKSNLTPYQYFNSGKSKLSYNQFKQHILNLSKSQDRISKKKKEYLLEERDINKFEVQKEFINRNLVDTRYATRELTNYLKAYFSANNMNVKVKTINGSFTDYLRKVWKFKKERNHGYKHHAEDALIIANADFLFKENKKLKAVNSVLEKPEIESKQLDIQVDSEDNYSEMFIIPKQVQDIKDFRNFKYSHRVDKKPNRQLINDTLYSTRKKDNSTYIVQTIKDIYAKDNTTLKKQFDKSPEKFLMYQHDPRTFEKLEVIMKQYANEKNPLAKYHEETGEYLTKYSKKNNGPIVKSLKYIGNKLGSHLDVTHQFKSSTKKLVKLSIKPYRFDVYLTDKGYKFITISYLDVLKKDNYYYIPEQKYDKLKLGKAIDKNAKFIASFYKNDLIKLDGEIYKIIGVNSDTRNMIELDLPDIRYKEYCELNNIKGEPRIKKTIGKKVNSIEKLTTDVLGNVFTNTQYTKPQLLFKRGN

SEQ ID NO: 191 - protein, 586 aa, Pseudoramibacter alactolyticus
MTYYLGLDMGTGSVGWAATDKNYKLIRAKGKDLWGVRLFQTAKTAAERRSHRVARLRRQREKVRIGYLKTIFSDAINKVDPGFFQRLDDSFFYAEDKNINQPYALFADTGYTDVDYYRDYPTIFHLRSTLIHDTSPKDVRLVYLAVLNMFKHRGHFLASNLSENGVDDFGDIYQQWCKSVPKPVQISDPEAKTEKIENILSKAGISNTRRLEALLEVFGIKRRDAFAEVLKLWCGLKGNLSKIWSETDFSDLDNTKPALSFKDSNLDMVLSQLEEILPDEDYSWLMLTKQIYDWSLLSGMMKDASGKSYDYLSDARVASYQKHSEDLKTLKRFYHDNHLSAAYDQMFRVMGKDNYSAYAGSVQSKKEVVRRGASCGIEELYKRIKKDLKPVPDCETKQIILENIERGTFLPKQLTRDNGVIPNQIHVHELKAILKNAENYLPFLKEGSELTNSEKILQLFQFQIPYYVGPLYSDENNYAWVVRKEGGRVFPWNFAEKVDEKASAEGFISELVARCTYLDNEKVLPKASLLYEKFMVLNELNNLRINGERISVDIKQELYQNLFTRGKKVTLKKSEGLFGGQRIFCL

SEQ ID NO: 192 - protein, 1385 aa, Gemella morbillorum
MKNKTWYLGLGVGPTSIGWAATDSNYKLLRKNKKRLWGVRLFEEAKTAVDRRTFRAERRRLARRKWRISLLEELFAKEVSKNDPNFFLRLKESKYHFEDKSLMNEYILFNDKDYTDKDYYKEYPTIYHLRLSLTTEENPDIRKVYLAVHSMLKNRGHFLLQGQSFNDSNIDSVIKELLELETVKINFEVTDEVIHSLKKIALEKKNLSDKNNDVKKLYPKEKQLQEIFKLVFGGKTSLDKLYDIEEYKELDNSVKSISFKEKVYEEVRPDYEQILSNYIELLDLAKLVYDSIVLADIKKEGKTISESKVELYNKHKDDLANLKKLVKIDSKLSEDKKKEVYFTIFKEDKEKGTNYVNYTHRSQEGKSCSYEDFKKFLKKELEKLEDSPTKTTILEELDLETFLPLQRTKDNSVVPYQIHKEELVKILDNAAKYHSFLAEKDDSGYSTREKVVQLFEFRIPYYIGPLNAHHNTENGGYSWAIRKKGMESVPVTPWNFKDVIDESASAEAFVNNLKNKCAYLSGEDVLPKNSLLYSEYALLNELNALRYEGNRISVEARDVIVTKLFKEQGKKVTKKTIKELLKTEGFIDGKGEIVGIDNIVKNDLKSYRDFKKILADKFDKERVENIILWITLYGESRKLIKEKITKVYGDFYTVDEIEKMSRLTYKDWGILSRKLLTELVSEKLYNEETGECLNIIGAMRQGTILFMELLADKFDYMSQIKNHNKENKDDITEITPDILENLHASPAVKRSIWQTVRIVEELKTIIGCVPTKIFIETTKRNNAPYKVPTLNRNDLVTKYKTIREHEIFELEKELKNTLDFTLNKNRLINEEPSKLKATKLYLYYTQLGRCMYTGKKIDLGELFDNNNKYDIDHIYPQSKVKDGSFNNIVLVTKASNDMKADVFPLKSKFQTKENKIFWRFLKEKKLITEEKYNRLVRTEEFSNGELTGFITRQLVETSQAIKVISNVLRELNPETTICYSKAENVSSFRQSFGKIKEANRKAENNEKLIRVQEINDYYNAKDAYLSIVVGNVYDVKFTRNVHNFIKNNKDARRYSLNGLFYTDVKNANTIAWEMDKTVHVVEKTMNNNNILITRRTSEQKGALYDATLYKAKVAEKAKEGTYYPLKTTDSKIKDVGKYGGFTKIKIAYYSIFEYTLDGKKGKQKITRIVPIPIYISQNIKDDKALLEYAQTRLPGKDLKIKYRKLCIGSLVKINNFNYYIGGKTNNNFTFDSAVQVILDKDSESYIKELAKYLNWKKENKDGKLWESITEDKNIQLYDSLVKKMNTGIFIRKTPNKYTELLTLEVKNKFINIDIDEQVKLLLEILNLLTNKKFTSKLNEIGITASRGVCSFNLSNQSQFSIIEQSVTGVYEKEKLIIEKKKEGIL

SEQ ID NO: 193 - protein, 1029 aa, Alicycliphilus denitrificans
MRSLRYRLALDLGSTSLGWALFRLDACNRPTAVIKAGVRIFSDGRNPKDGSSLAVTRRAARAMRRRRDRLLKRKTRMQAKLVEHGFFPADAGKRKALEQLNPYALRAKGLQEALLPGEFARALFHINQRRGFKSNRKTDKKDNDSGVLKKAIGQLRQQMAEQGSRTVGEYLWTRLQQGQGVRARYREKPYTTEEGKKRIDKSYDLYIDRAMIEQEFDALWAAQAAFNPTLFHEAARADLKDTLLHQRPLRPVKPGRCTLLPEEERAPLALPSTQRFRIHQEVNHLRLLDENLREVALTLAQRDAVVTALETKAKLSFEQIRKLLKLSGSVQFNLEDAKRTELKGNATSAALARKELFGAAWSGFDEALQDEIVWQLVTEEGEGALIAWLQTHTGVDEARAQAIVDVSLPEGYGNLSRKALARIVPALRAAVITYDKAVQAAGFDHHSQLGFEYDASEVEDLVHPETGEIRSVFKQLPYYGKALQRHVAFGSGKPEDPDEKRYGKIANPTVHIGLNQVRMVVNALIRRYGRPTEVVIELARDLKQSREQKVEAQRRQADNQRRNARIRRSIAEVLGIGEERVRGSDIQKWICWEELSFDAADRRCPYSGVQISAAMLLSDEVEVEHILPFSKTLDDSLNNRTVAMRQANRIKRNRTPWDARAEFEAQGWSYEDILQRAERMPLRKRYRFAPDGYERWLGDDKDFLARALNDTRYLSRVAAEYLRLVCPGTRVIPGQLTALLRGKFGLNDVLGLDGEKNRNDHRHHAVDACVIGVTDQGLMQRFATASAQARGDGLTRLVDGMPMPWPTYRDHVERAVRHIWVSHRPDHGFEGAMMEETSYGIRKDGSIKQRRKADGSAGREISNLIRIHEATQPLRHGVSADGQPLAYKGYVGGSNYCIEITVNDKGKWEGEVISTFRAYGVVRAGGMGRLRNPHEGQNGRKLIMRLVIGDSVRLEVDGAERTMRIVKISGSNGQIFMAPIHEANVDARNTDKQDAFTYTSKYAGSLQKAKTRRVTISPIGEVRDPGFKG

SEQ ID NO: 194 - protein, 1422 aa, Sutterella wadsworthensis
MTQSERRFSCSIGIDMGAKYTGVFYALFDREELPTNLNSKAMTLVMPETGPRYVQAQRTAVRHRLRGQKRYTLARKLAFLVVDDMIKKQEKRLTDEEWKRGREALSGLLKRRGYSRPNADGEDLTPLENVRADVFAAHPAFSTYFSEVRSLAEQWEEFTANISNVEKFLGDPNIPADKEFIEFAVAEGLIDKTEKKAYQSALSTLRANANVLTGLRQMGHKPRSEYFKAIEADLKKDSRLAKINEAFGGAERLARLLGNLSNLQLRAERWYFNAPDIMKDRGWEPDRFKKTLVRAFKFFHPAKDQNKQHLELIKQIENSEDIIETLCTLDPNRTIPPYEDQNNRRPPLDQTLLLSPEKLTRQYGEIWKTWSARLTSAEPTLAPAAEILERSTDRKSRVAVNGHEPLPTLAYQLSYALQRAFDRSKALDPYALRALAAGSKSNKLTSARTALENCIGGQNVKTFLDCARRYYREADDAKVGLWFDNADGLLERSDLHPPMKKKILPLLVANILQTDETTGQKFLDEIWRKQIKGRETVASRCARIETVRKSFGGGFNIAYNTAQYREVNKLPRNAQDKELLTIRDRVAETADFIAANLGLSDEQKRKFANPFSLAQFYTLIETEVSGFSATTLAVHLENAWRMTIKDAVINGETVRAAQCSRLPAETARPFDGLVRRLVDRQAWEIAKRVSTDIQSKVDFSNGIVDVSIFVEENKFEFSASVADLKKNKRVKDKMLSEAEKLETRWLIKNERIKKASRGTCPYTGDRLAEGGEIDHILPRSLIKDARGIVFNAEPNLIYASSRGNQLKKNQRYSLSDLKANYRNEIFKTSNIAAITAEIEDVVTKLQQTHRLKFFDLLNEHEQDCVRHALFLDDGSEARDAVLELLATQRRTRVNGTQIWMIKNLANKIREELQNWCKTTNNRLHFQAAATNVSDAKNLRLKLAQNQPDFEKPDIQPIASHSIDALCSFAVGSADAERDQNGFDYLDGKTVLGLYPQSCEVIHLQAKPQEEKSHFDSVAIFKEGIYAEQFLPIFTLNEKIWIGYETLNAKGERCGAIEVSGKQPKELLEMLAPFFNKPVGDLSAHATYRILKKPAYEFLAKAALQPLSAEEKRLAALLDALRYCTSRKSLMSLFMAANGKSLKKREDVLKPKLFQLKVELKGEKSFKLNGSLTLPVKQDWLRICDSPELADAFGKPCSADELTSKLARIWKRPVMRDLAHAPVRREFSLPAIDNPSGGFRIRRTNLFGNELYQVHAINAKKYRGFASAGSNVDWSKGILFNELQHENLTECGGRFITSADVTPMSEWRKVVAEDNLSIWIAPGTEGRRYVRVETTFIQASHWFEQSVENWAITSPLSLPASFKVDKPAEFQKAVGTELSELLGQPRSEIFIENVGNAKHIRFWYIVVSSNKKMNESYNNVSKS

SEQ ID NO: 195 - protein, 1132 aa, Nitratifractor salsuginis
MKKILGVDLGITSFGYAILQETGKDLYRCLDNSVVMRNNPYDEKSGESSQSIRSTQKSMRRLIEKRKKRIRCVAQTMERYGILDYSETMKINDPKNNPIKNRWQLRAVDAWKRPLSPQELFAIFAHMAKHRGYKSIATEDLIYELELELGLNDPEKESEKKADERRQVYNALRHLEELRKKYGGETIAQTIHRAVEAGDLRSYRNHDDYEKMIRREDIEEEIEKVLLRQAELGALGLPEEQVSELIDELKACITDQEMPTIDESLFGKCTFYKDELAAPAYSYLYDLYRLYKKLADLNIDGYEVTQEDREKVIEWVEKKIAQGKNLKKITHKDLRKILGLAPEQKIFGVEDERIVKGKKEPRTFVPFFFLADIAKFKELFASIQKHPDALQIFRELAEILQRSKTPQEALDRLRALMAGKGIDTDDRELLELFKNKRSGTRELSHRYILEALPLFLEGYDEKEVQRILGFDDREDYSRYPKSLRHLHLREGNLFEKEENPINNHAVKSLASWALGLIADLSWRYGPFDEIILETTRDALPEKIRKEIDKAMREREKALDKIIGKYKKEFPSIDKRLARKIQLWERQKGLDLYSGKVINLSQLLDGSADIEHIVPQSLGGLSTDYNTIVTLKSVNAAKGNRLPGDWLAGNPDYRERIGMLSEKGLIDWKKRKNLLAQSLDEIYTENTHSKGIRATSYLEALVAQVLKRYYPFPDPELRKNGIGVRMIPGKVTSKTRSLLGIKSKSRETNFHHAEDALILSTLTRGWQNRLHRMLRDNYGKSEAELKELWKKYMPHIEGLTLADYIDEAFRRFMSKGEESLFYRDMFDTIRSISYWVDKKPLSASSHKETVYSSRHEVPTLRKNILEAFDSLNVIKDRHKLTTEEFMKRYDKEIRQKLWLHRIGNTNDESYRAVEERATQIAQILTRYQLMDAQNDKEIDEKFQQALKELITSPIEVTGKLLRKMRFVYDKLNAMQIDRGLVETDKNMLGIHISKGPNEKLIFRRMDVNNAHELQKERSGILCYLNEMLFIFNKKGLIHYGCLRSYLEKGQGSKYIALFNPRFPANPKAQPSKFTSDSKIKQVGIGSATGIIKAHLDLDGHVRSYEVFGTLPEGSIEWFKEESGYGRVEDDPHH

SEQ ID NO: 196 - protein, 1327 aa, Solobacterium moorei
MEGQMKNNGNNLQQGNYYLGLDVGTSSVGWAVTDTDYNVLKFRGKSMWGARLFDEASTAEERRTHRGNRRRLARRKYRLLLLEQLFEKEIRKIDDNFFVRLHESNLWADDKSKPSKFLLFNDTNFTDKDYLKKYPTIYHLRSDLIHNSTEHDIRLVFLALHHLIKYRGHFIYDNSANGDVKTLDEAVSDFEEYLNENDIEFNIENKKEFINVLSDKHLTKKEKKISLKKLYGDITDSENINISVLIEMLSGSSISLSNLFKDIEFDGKQNLSLDSDIEETLNDVVDILGDNIDLLIHAKEVYDIAVLTSSLGKHKYLCDAKVELFEKNKKDLMILKKYIKKNHPEDYKKIFSSPTEKKNYAAYSQTNSKNVCSQEEFCLFIKPYIRDMVKSENEDEVRIAKEVEDKSFLTKLKGTNNSVVPYQIHERELNQILKNIVAYLPFMNDEQEDISVVDKIKLIFKFKIPYYVGPLNTKSTRSWVYRSDEKIYPWNFSNVIDLDKTAHEFMNRLIGRCTYTNDPVLPMDSLLYSKYNVLNEINPIKVNGKAIPVEVKQAIYTDLFENSKKKVTRKSIYIYLLKNGYIEKEDIVSGIDIEIKSKLKSHHDFTQIVQENKCTPEEIERIIKGILVYSDDKSMLRRWLKNNIKGLSENDVKYLAKLNYKEWGRLSKTLLTDIYTINPEDGEACSILDIMWNTNATLMEILSNEKYQFKQNIENYKAENYDEKQNLHEELDDMYISPAARRSIWQALRIVDEIVDIKKSAPKKIFIEMAREKKSAMKKKRTESRKDTLLELYKSCKSQADGFYDEELFEKLSNESNSRLRRDQLYLYYTQMGRSMYTGKRIDFDKLINDKNTYDIDHIYPRSKIKDDSITNRVLVEKDINGEKTDIYPISEDIRQKMQPFWKILKEKGLINEEKYKRLTRNYELTDEELSSFVARQLVETQQSTKALATLLKKEYPSAKIVYSKAGNVSEFRNRKDKELPKFREINDLHHAKDAYLNIVVGNVYDTKFTEKFFNNIRNENYSLKRVFDFSVPGAWDAKGSTFNTIKKYMAKNNPIIAFAPYEVKGELFDQQIVPKGKGQFPIKQGKDIEKYGGYNKLSSAFLFAVEYKGKKARERSLETVYIKDVELYLQDPIKYCESVLGLKEPQIIKPKILMGSLFSINNKKLVVTGRSGKQYVCHHIYQLSINDEDSQYLKNIAKYLQEEPDGNIERQNILNITSVNNIKLFDVLCTKFNSNTYEIILNSLKNDVNEGREKFSELDILEQCNILLQLLKAFKCNRESSNLEKLNNKKQAGVIVIPHLFTKCSVFKVIHQSITGLFEKEMDLLK

SEQ ID NO: 197 - protein, 738 aa, Treponema phagedenis
MLQELFAKEIAKIDEGFFRRLDESAFYLEDKSLKQKYSLFNDDNFTDKDYYKKFPTIHHLIKALINDETHVDIRLLYLACHTIIKNRGHFLFEGKEFNTESRFDDAINELFSYLRQDMEIDFAFEDKIADIKEILENKKIGMRDKQNALNKKLSIAPKDKQKKEIIKLIVGASFNLKTLFNDEKYSSEKESYSFAKSNYEEKEAVLESLLGDGFGLILRAKAVYDSSVLSEILGNETYLSFAKVKIYDKHKEDLAKLKKVIKTYHADEFKKVFAEANIQGNYCSYVGSCKKNGKKVPIEKRADKDAFYDFLKKILKDEKAKNSDADYAFILNEIELKTFLPKQVSKKNANIPYQLRRMELEKIVNNAEKYFSFLSEKDEYGTVKEKIIQLLTFKRPYYIGIIQDTHKEKFPDRCWVVKKENAKNEKITPWNFYDHIDEDKTAEAFITSRTNKCTYLIGEDVLPRNSLLYMEYTVLNELNNLKVSVDGVNIFDVKLKKKIYEQVFKQRKEVSKKTIADFLKKEGICKKENDVVITGIDEKCTTSLKLYIDIKKIIGKRIEEEPTKNALEDIILWASIYDEGEGRKILEAKIQSVYPDVFTQDELNKILKLKISGWGRFSRKFLESIVASFPGFTDTINIITAMRETNFNLMELLGDAYGFSKGIEKFNSKFNDDKKVFSYDKLVKDLYLSPSVKRMLWRALVIVKEVKSIMGKDPKKYLLKWQEEKKLKREGLPPAMQV

SEQ ID NO: 198 - protein, 1377 aa, Streptococcus equinus
MEKTYSIGLDIGTNSVGWAVITDDYKVPAKKMKVLGNTDKKYIKKNLLGALLFDSGETAEATRLKRAARRRYTRRKNRLRYLQEIFAKEMAKVDESFFQRLEESFLTDDDKTFDSHPIFGNKAEEDTYHQEFPTIYHLRKHLADSPEKVDLRLVYLALAHMIKFRGHFLIEGQLNAENTDVQKIFADFVGVYDRTFDDSHLSEITVDAASILTEKISKSRRLENLIKQYPTEKKNTLFGNLVALALGLQPNFKTNFKLSEDAKLQFSKDTYDEDLEELLGKIGDDYADLFTAAKNLYDAILLSGILTVDDNSTKAPLSASMIKRYEEHHEDLEKLKTFIKVNNFDKYHEIFKDKSKNGYAGYIENGVKQDIFYKHLKSIISEKNGGQYFLDKIEREDFLRKQRTFDNGSIPYQIHLQEMRTILRRQGEYYPFLKENQAKIEKILTFRIPYYVGPLARKNSRFAWAKYHSDEPITPWNFDEVVDKEKSAEKFITRMTLNDLYLPEEKVLPKHSYVYETFAVYNELTKIKYVNEQGKSFFFDANMKQEIFDHVFKENRKVTKAKLLSYLNNEFEEFRINDLIGLDKDSKSFNASLGTYHDLKKILDKSFLDDKTNEQIIEDIVLTLTLFEDRDMIHERLQKYSDIFTSQQLKKLERRHYTGWGRLSYKLINGIRNKENNKTILDFLIDDGDANRNFMQLINDDSLSFKTTIQEAQVVGDVDDIEAVVHDLPGSPAIKKGILQSVKIVDELVKVMGHNPQNIVIEMARENQITGYGRNRSNQRLKRLQDSLKEFGSDILSKKKPSYVDSKVENSHLQNDRLFLYYIQNGKDMYTGEELDIDHLSDYDIDHIIPQAFIKDNSIDNRVLTSSAKNRGKSDDVPSIEIVRNRKSYWYKLYKSGLISKRKFDNLTKAERGGLTETDKAGFIKRQLVETRQITKHVAQILDARFNTKCDENDKVIRDVKVITLKSSLVSQFRKEFKFYKVREINDYHHAHDAYLNAVVGTALLKKYPKLAPEFVYGEYKKYDVRKLVAKSSDNHSELGKATAKYFFYSNLMNFFKTEVKYADGRVFERPDIETNADGEVVWNKQRDFNIVRKVLSYPQVNIVKKVEVQTGGFSKESILPKGDSDKLIPRKTKKLQWETQKYGGFDSPTVAYSVLVVADVEKGKTRKLKTVKELVGISIMERSSFEENPVSFLEKKGYHNVQEDKLIKLPKYSLFEFEGGRRRLLASATELQKGNEVVLPQYMVNLLYHSQHVNNSHKPEHLNYVKQHKDEFKDIFNLIISIARINILKPKVVDNLINEFTEYGQEDISSLSESFINLLKFISFGAPGAFKFLKLDVKQSNLRYKSTTEALSATLIHQSVTGLYETRIDLSKLGEE

SEQ ID NO: 199 - protein, 1128 aa, Streptococcus vestibularis
MSDLVLGLDIGIGSVGVGILNKVTGEIIHKNSRIFPAAQAENNVERRTNRQGRRLTRRKKHRRVRLNHLFEESGLITDFTKVSINLNPYQLRVKGLIDELSNEELFIALKNMVKHRGISYLDDASDDGNSSVGDYAQIVKENSKQLETKTPGQIQLERYQKYGQLRGDFTVEEDGKKHRLINVFPTSAYRSEALRILQTQKEFNPQITDEFINRYLEILTGKRKYYHGPGNEKSRTDYGRYTTKKDSENEYITLDNIFGILIGKCTFYPEEYRAAKASYTAQEFNLLNDLNNLTVPTETKKLSEEQKNQIINYVKNEKAMGPAKLFKYIAKLLSCDVADIKGYRIDKSDKAEIHTFEAYRKMKTLETIDFEKMSRDQLDKLAYVLTLNTEREGIQEALDHEFADGNFSQEQIDELVQFRKANSSIFGKGWHNFSVKLMMELIPELYATSEEQMTILTRLGKQKTTSSSNKTKYIDEKLLTEEIYNPVVAKSVRQAIKIVNAAIKEYGDFDNIVIEMARETNEDDEKKAIQKIQKANKDEKDAAMLKAANQYNGRAELPHSVFHGHKQLATKIRLWHQQGERCLYTGKTISIHDLINNPNQFEIDHILPLSITFDDSLANKVLVYATANQEKGQRTPYQALDSMDDAWSFRELKAFVRESKSLSNKKKEYLLTEEDISRFDVRKKFIERNLVDTRYASRVVLNALQEHFRAHKTDTKVSVVRGQFTSQLRRHWGIEKTRDTYHHHAVDALIIAASSQLNLWKKQKNTLVNYSENQLLDIETGELISDDEYKESVFKAPYQHFVDTLKSKEFEDSILFSYQVDSKFNRKISDATIYATRQAKVGKDKKDETYVLGKIKDIYSQTGYDAFIKIYQKDKSKFLMYRHDPQTFEKVIEPILENYPNKEMNEKGKEVPCNPFLKYKEEHGDYIRKYSKKGNGPEIKSLKYYDSKLGNHIDITPKDSNNKVVLQSVSPWRADVYFNKTTGKYEILGLKYADLQFEKGTGTYKISQEKYNVIKKKEGVDSDSEFKFTLYKNDLLLIKDTETKEQQLFRFLSRTKPNVKHYVELKPYDKQKFEGNESLINVLGAVAKGGQCQKGINKPNISIYKVRTDVLGNQHIIKNEGDKPKLDF

SEQ ID NO: 200 - protein, 1080 aa, Methylocystis sp.
MRVLGLDGGIASIGWALIEIFEDHEPSDGRIIDTGAWMFDAPEEKSQTGTKLKSELRRIFRGQRRVIRRRRQRMNEVRRILHRHGLLSSDNRDALKQPGLDPWKIRAEGIDRLLSPIEFAVALGHIARHRGFKSNSKGAKTSDLDAESSRMKKAVGETREKLARFGSPAKLLVEDEGFVLRQTKLKSGALETVRRFRNRDGDYSRSLLRDDLAAEVRALFRAQARLQSTFAKVELEAEFTQAAFFQRPLQDSERLVGPCPFEPAEKRSPKRGYSFELFRFLSRLNHLTLREGSEERTLTVEELRTAAADFGGVAKFTFSTLRKRLALPDIAIFVGIKADDEKKLDVVARSGEAATGTARLRRVVIDALGELAWGALISAPERLDKITEIITFRSDLDRIRAGLIEAGFDTPLIEAIVRAAADGKLDAFTGVGHISAKAARNIIPGLMRGMTYDKACAAAGYDHTASRERDAFDVGMHGKEALKKILQEERISRELVGSPSARKALIEAVKQVKAIIEKYGVPDRIHVELARDVGKSIEERRDIHFGIEKRSRQKDKLRELFGKEVGHLPQDGERGKEELLRFELWNEQMGRCLYTDEYINPKQLVASDNSVQVDHILPWSRFGDDSYLNKTLCTAKANQDKKGRTPYEWFRADKPEAEWDAFVARVESIQFMKGLKKRNYKLKNAEEAAEKFRSRNLNDTRWTCRLLAEALKQLYPKGEKDKDGKERRRVFTRPGALTNRLRRAWSLQRRKKSEKGERIADDRHHALDAIIVAATTESLLIRATREVQDIERKGLHYDLTKNITQPWPGFADEALDAVEKVFVARAERRRARGKAHDATIRHIAVRDDEAKVYERKKVGDIKLGDLIRVKDAERNAPLIENLRKWIEAGSPRDNPPLSPKGDPVSKVRLVTKNKVNITLDTGNPERLATVDRGEMARVDVFRKANRKGKYEYYLVPIYPHEIATMETPPMRAVQGGGDDDKWPEIDSTFEFLWSINQLSLLELTKPDGEVIRSYFRSLDRNTGALTVSGIANSTATRKGIGTRTLIDFKKLHVDRLGQIFEVERELRTWRGETWRGKDCI

SEQ ID NO: 201 - protein, 1087 aa, Phascolarctobacterium succinatutens
MLRMKYAIGLDIGIASVGYAVLALDHEENPWGIIRLGSRIFDVAENPKDGASLALPRREARSVRRRLRRHHHRLERIKNLLINTEFITKDELLHLYDGNLSDVYELRVKALDYSVTNAELTRILLHLAQRRGFKSNRKSDANDKEAGQLLEAVSANAKRMQENHYRTVGEMFYKDDLFSKYKRNKGGTYLTTVHRDMIAAEARTILEKQFALGNNICTQDFIDKYLSILLSQRQFDEGPGEPSPYAGNQIANMIGKCTFEPNEYRAAKASYSFERFNLLQKVNHLRLLLEGKSIALDNEQRKKIIALAHDKADLRYSHIRKALGLDEKVLFNTITYNDDVSVIEKKTKFNFLQAYHQIKKVLAEDMQKLTTEQLDNIGQILSTYKSDNKRTEELSALGLEKKIIDALLGINGLSKFAHLSLKALRKINPYLEEGKIYNEACTAAGYDFKAHANTQKTELLPAYKEEMDDITSPVARRAIAQSIKVINAIIREQKGSPLYINIELAREMAKGFDERTQIDKANKENQAKNERIMERIRTEFHKANPTGMDLIKLKLWEEQDGRSPYSQKAISINRLFEPGYVDIDHIVPYSISFDDSFKNKVLVFSDENRDKGNRLPIAYLQSKFGAKAAENFMIWVQSNIKDYKKRQKLLKREITEEDINKFKERNLQDTKTISRFLYNYINDYLLFAPSDTGKKKRVTAVNGTITAYLRKRWGINKIRANGDKHHAVDAVVIACTTDKMIKDLSSFSRYHELEYTHTDTESFLVNSLTGEILKRFPYPWEDFRPELMARLSDNPADALRKLNLIFYHGIDLSTIKPIFVSRMPRHKVTGAAHKATIKSARCLDNGIVICKTSLQNLKLDKEGEIANYYAPESDTILYNALKERLRSYDNKPAKAFAEPFYKPKADGTPGPLVKKVKVYEKSTLNVAVQQNTAVADNDSMVRVDVFHVKGNGYYLVPIYIADTLKKELPNKAIVAYKPYADWPVMDDSNFIFSLYPNDLIKFEHKNSVKFAKVNKESTLNDFYSTKSEIVYFKGCNINTGAITIINHENTYVVSSLGVKTLPSLEKYQADVLGNYTKVKKEVRKPFR

SEQ ID NO: 202 - protein, 1375 aa, Lactobacillus ruminis
MRKNQEPYNIGLDIGTSSIGWSIMNDNFDLMRVKGKKGIGVRLYNEGQSAAERRMHRTARRRYGRRKWRLRLLEDFFDEHMAEVDDTFFARLKDSNISPKDDKKYRKSLLFPKSKGVTYQDDGEFYKKYPTMYHLRYALMTEHRKFDLREIYLAFHHMVKYRGNFLYDTSVDSFEAKNLDIKGKFDEINDLLSSYTDFYVDNSNAALVESILLEKNTTRKDKSKKIAKLLHVEDKEKGKNKKAKDLATQISNAVLGLKCNFHLIFELQQKYSFDLCSEKTEENIAKLSEVLDENQKMLLMILKEVQDQVMLNAFVPSGMSLSEAMMQKYDDYGEQLKIYHELEHSVSDDSAAKLRGAYRDYNDNIIKRIDGDNKKDTFYKRVKNILTKISKEYVDQDVLESCGKLKKLIDENKLFIRQRTAANGVLPHQLHQIEMRKIIDNQKEYYPWLAEPNPNEKRRVYSKYKVEELIAFRIPYYVGPLVDPNNADKNKEARFSWMVRKKDGEITPWNFYDKVDWAESANNFIERMKSKDTYLLGEDVVPKESMLYQKYEVLNELNNLRINDSGLSDSFEDVKLKQAIYNDLFKKQKIVKITDLQNYLVQNHKYLVKPKISGLADENRFLSSLSTYSDLKTIFGDKVDDRTYFNDFEKMVEYSTVFEDGHDYNQKLDEYTWLTKEEKYKIGKKRYRGWGKLSKKLLTGLRDKNNHTIMDNLWETNRNFMQIQTADEFSKQIAEENERHLKGSVSDAINDMYTSPANKKAIRQVLRVVDDIQKAMGYAPSSISLEFAREDGPSVRTVSRANRMKSIYEKYASEVSEEVMKDLDGVIKDKKGLNDRLYLYFEQQGKDMYSGHPLDFDKVISGQEYDIDHILPQAVIKDDSLDNRVLTTKALNNDVKSKGVPCRMFNGMHSFWKNLYDKGFISRRKFNNLTTNPENIDKYKMKGFVNRQLVETRQIIKLVANVLNDKYQNDDVDIIEVRAELTHDVRKHFKFYKNRNVNDYHHAFDAYLTSFIGHYLFKKYPNLRPLFDYNDFMKVSDNVFKQLRGNNFLGEFLNKTGDIISTDGNFVLNKEEMINKLNKAYAFKKILVTKEVGQRTGAMFNETRYPAPNSRKAALKYRRMPKPDSLISVKDYKNTDIYGGYSGKNDAYMVIVDMGKQYMVVGVPVRYTEKLDKLRIKHSELYRDELRKVLSRDKTLLDSKGNVKRFDIVLDRVLYGQLIEDGNELFTLGSSKYKRNFRQLFLDKQCIEILDSSATPQPTDEELIWVYDQILDKVDKYFELYDINRQRETLRKGRAAFCSLPNISMKKDDVTKKKILNEILVALHANESESNCEKIGKKVFGRLQVPGGIKLSKEAKLIYQSPTGLFERVVYLKDL

SEQ ID NO: 203 - protein, 1391 aa, Prevotella oralis
MKKILGLDLGTTSIGWALVNEKENNEELSSIIRLGVRVNPLTVDEKSNFEKGKDITTNADRTKCRSARRNLQRFKLRREALADCLKRHGLMTDETPLCETNNSIIFKTYSNRAKAVCEKIALDDFVRVLFMINKKRGYKSSRKLNTDDEGTLVDGMDVAKLLYNEQITPGEYLLRLFKKGKKTRPDFYLSDLKAELERIWDFQRTFYPEILCNALKEDLKGKSRTQSSAIFYAKYKVSTAKIAGKDKRLQELTWRTDALRKQLTIDEVAYVICSINGEVNGSSQRLSMISDRSKLLYFNHQTIGQYLMQRLEENPNAGLKNIIFYRQDYEDEFNDIWNSQATYHKELTPELKKEVKDIIFYQRGLKSCKWLINYCELEHEEIEVKTPEGKLRKITIGSKTCPKSSPLFQEFKIWQVLNNLQVSPLNSRRKAKRKKDEEPSLFSDEDMNTACRYLNEEEKLTLFKELSIKKELKKKDALKLLFENYKELDLNYKVISGNVTMANLYRAFQDIISLTGNGEFDFQAMPAEEAEKTVEEIFGGLGYKTAFLHFDASLHDKEFERQPAYRLWHLLYSYAGDQSKTGIEALVKRIQELCGFEPEYARILANISFIPDYGNLSSKAMRKILPYMQDGYEYSEACSKAGYRHSASSLTKEEINKKNYKTHLDEIKRNSLRNPIVEKILNQMVNVVNSVIDTYSNIDEIRIEMARELKKSKPEREDMSFAISKATKETERIKGILEQEFKIQHVTRNDIIRYRLYEELKPNGYKTLYSNTYIPREDLFSKKFDIEHIIPKARLFDDSYSNKTLELRDINIEKGNQTAYDFVLSKYGEEGLYKYEQRVEEFKKNNEQAGTKCRKLLMREADIPSDFLNRDLNDSQYIAKKAHELLREIVPTVTATTGSITNRLREDWKLVNVMKELNWEKYDKLGLTEEYKDKDGNTVRHIKDWTKRNDHRHHAMDALTIAFTKPSFIQYLNNLNARSNRGGSIYGIEQKELERENNKLVFIPPIDPKIFRKQAKEHLSNILISIKAKNKVVTKNVNKTKSKSGTNRKVQLTPRGQLHLETVYGKIRTYKTEEIKVGTKLTEELIAKVADKKIREALMQRLSEYGGNIKKAFQNISKHPIWLNGSHTKHVPEKVKIVFFEDVFTIRKAITPDIKIDKVIDSKIRRILQERLNEFGGEASKAFSNLDENPIWFNRDKGIAIKSVKIRGIAKGTAIRVKKDIHGKTIIGNNGYPVANDYVNTGNNHHVAIFRDKDGNLQEHIVSFYEATARAIQNLPIVDRNYNSEKDWKFLFSMKQNEYFVFPNPNTGFNPSEISLKDEKNYALISPNLFRVQKLSHYYYVFRHHLETNVDTNLQLKDITWKRITAVNNLTGAVKVRIDHLGRIVDVGEYK

SEQ ID NO: 204 - protein, 1167 aa, Streptococcus sanguinis
MLFGLKTKFKDCFELEEEPDLNFSKENYDDNLEKLLGELGEDFSDVFDKLKILRDTILLSGMLTYTGATHARFSATMVERYEEHRKDLQRFKSFIKQNLSEQDYLDIFGRKTQNGFDVDKETKGYVGYITNKMVLTNPQKQKTIQQNFYDYISGKITGIEGSEYFLNKISDRTFLRKLRTSDNGAIPNQIHAYELEKIIERQGKDYPFLLENKDKLLSILTFKIPYYVGPLAKGNNSRFAWIKRANSSDILDDNDEDTRNGKIRPWNYHKLINMDETRDAFITNLIGNDTILLNEKVLPKRSLIYEEVMLQNELTRVKYKDKYGKAHFFDSEHRQNIINGLFKINSKRVNAERLIKYLSDNHKDLNAIEIVSGVEKGKSFNSTLKTYNDFKTIFSEEFLDSEIYQKELEEIIKVITVFDDKKSIKNYLTKYFGHLEFLDEEKINQLSKLRYTGWGRYSAKLLLDIRDEDTGFNLLQFLRNDEENRNLTNLISDNTLSFDPKIKAIQSKSTVEDDVFDEIKKLAGSPAIKRGILNSIKIVDELVQIIGYPPQNIVIEMARENMTTEEGQKKTKTRKSKLESALKNIENSVLENGKVLHSDEQLQSEKLYLYYLQNGKDIYSLDETGSPAPIYLDQLDQYEVDHIIPYSFLPIDSIDNKVLTHRKNNQRKLDNIPDKETVAHMKPFWEALYNAKLISQTKYQRLTTSERTPDGVLTESMKAGFIERQLVETRQIIKHVARILDNRFSDTKIITLKSQLVTNFRNTFHIAKIRELNDYHHAHDAYLAVVVGQTLLKAYPKLAPELIYGHHVHFNRHEENKATLRKHLYSNIMRFFNNPDSKVSKDIWDCNRDLPIIKHVIYNSQINFVKRTMIKKGAFYNQNPVGKFNKQLAANNRYPLKTKALCLDTSIYGGYGPMNSTLSIIIIAERFNEKKGKIETVKEFHDIFIIDYEKFNNNPFQFLNDTSENGFLKKNNINRVLGFYRIPKYSLMQKIDGTRMLFESKLNLHKATQFKLTKTQNELFFHMKRLLTNSNLMDLKSESAIKESQNFILKHKEEFDNISNQLSAFSQKMLGNTTSLKNLIKGYNERKIKEIDIREETIKYFYDNFIKMFSFVKSGAPKDINDFFDNKYTVARMRPKPDKRLLNATLIHQSITGLYETRIDLSKLGED

SEQ ID NO: 205 - protein, 1334 aa, Staphylococcus pseudintermedius
MGRKPYILSLDIGTGSVGYACMDKGFNVLKYHDKDALGVYLFDGALTAQERRQFRTSRRRKNRRIKRLGLLQELLAPLVQNPNFYQFQRQFAWKNDNMDFKNKSLSEVLSFLGYESKKYPTIYHLQEALLLKDEKFDPELIYMALYHLVKYRGHFLFDHLKIENLTNNDNMHDFVELIETYENLNNIKLNLDYEKTKVIYEILKDNEMTKNDRAKRVKNMEKKLEQFSIMLLGLKFNEGKLFNHADNAEELKGANQSHTFADNYEENLTPFLTVEQSEFIERANKIYLSLTLQDILKGKKSMAMSKVAAYDKFRNELKQVKDIVYKADSTRTQFKKIFVSSKKSLKQYDATPNDQTFSSLCLFDQYLIRPKKQYSLLIKELKKIIPQDSELYFEAENDTLLKVLNTTDNASIPMQINLYEAETILRNQQKYHAEITDEMIEKVLSLIQFRIPYYVGPLVNDHTASKFGWMERKSNESIKPWNFDEVVDRSKSATQFIRRMTNKCSYLINEDVLPKNSLLYQEMEVLNELNATQIRLQTDPKNRKYRMMPQIKLFAVEHIFKKYKTVSHSKFLEIMLNSNHRENFMNHGEKLSIFGTQDDKKFASKLSSYQDMTKIFGDIEGKRAQIEEIIQWITIFEDKKILVQKLKECYPELTSKQINQLKKLNYSGWGRLSEKLLTHAYQGHSIIELLRHSDENFMEILTNDVYGFQNFIKEENQVQSNKIQHQDIANLTTSPALKKGIWSTIKLVRELTSIFGEPEKIIMEFATEDQQKGKKQKSRKQLWDDNIKKNKLKSVDEYKYIIDVANKLNNEQLQQEKLWLYLSQNGKCMYSGQSIDLDALLSPNATKHYEVDHIFPRSFIKDDSIDNKVLVIKKMNQTKGDQVPLQFIQQPYERIAYWKSLNKAGLISDSKLHKLMKPEFTAMDKEGFIQRQLVETRQISVHVRDFLKEEYPNTKVIPMKAKMVSEFRKKFDIPKIRQMNDAHHAIDAYLNGVVYHGAQLAYPNVDLFDFNFKWEKVREKWKALGEFNTKQKSRELFFFKKLEKMEVSQGERLISKIKLDMNHFKINYSRKLANIPQQFYNQTAVSPKTAELKYESNKSNEVVYKGLTPYQTYVVAIKSVNKKGKEKMEYQMIDHYVFDFYKFQNGNEKELALYLAQRENKDEVLDAQIVYSLNKGDLLYINNHPCYFVSRKEVINAKQFELTVEQQLSLYNVMNNKETNVEKLLIEYDFIAEKVINEYHHYLNSKLKEKRVRTFFSESNQTHEDFIKALDELFKVVTASATRSDKIGSRKNSMTHRAFLGKGKDVKIAYTSISGLKTTKPKSLFKLAESRNEL

SEQ ID NO: 206 - protein, 1156 aa, Ruminococcus albus
MGNYYLGLDVGIGSIGWAVINIEKKRIEDFNVRIFKSGEIQEKNRNSRASQQCRRSRGLRRLYRRKSHRKLRLKNYLSIIGLTTSEKIDYYYETADNNVIQLRNKGLSEKLTPEEIAACLIHICNNRGYKDFYEVNVEDIEDPDERNEYKEEHDSIVLISNLMNEGGYCTPAEMICNCREFDEPNSVYRKFHNSAASKNHYLITRHMLVKEVDLILENQSKYYGILDDKTIAKIKDIIFAQRDFEIGPGKNERFRRFTGYLDSIGKCQFFKDQERGSRFTVIADIYAFVNVLSQYTYTNNRGESVFDTSFANDLINSALKNGSMDKRELKAIAKSYHIDISDKNSDTSLTKCFKYIKVVKPLFEKYGYDWDKLIENYTDTDNNVLNRIGIVLSQAQTPKRRREKLKALNIGLDDGLINELTKLKLSGTANVSYKYMQGSIEAFCEGDLYGKYQAKFNKEIPDIDENAKPQKLPPFKNEDDCEFFKNPVVFRSINETRKLINAIIDKYGYPAAVNIETADELNKTFEDRAIDTKRNNDNQKENDRIVKEIIECIKCDEVHARHLIEKYKLWEAQEGKCLYSGETITKEDMLRDKDKLFEVDHIVPYSLILDNTINNKALVYAEENQKKGQRTPLMYMNEAQAADYRVRVNTMFKSKKCSKKKYQYLMLPDLNDQELLGGWRSRNLNDTRYICKYLVNYLRKNLRFDRSYESSDEDDLKIRDHYRVFPVKSRFTSMFRRWWLNEKTWGRYDKAELKKLTYLDHAADAIIIANCRPEYVVLAGEKLKLNKMYHQAGKRITPEYEQSKKACIDNLYKLFRMDRRTAEKLLSGHGRLTPIIPNLSEEVDKRLWDKNIYEQFWKDDKDKKSCEELYRENVASLYKGDPKFASSLSMPVISLKPDHKYRGTITGEEAIRVKEIDGKLIKLKRKSISEITAESINSIYTDDKILIDSLKTIFEQADYKDVGDYLKKTNQHFFTTSSGKRVNKVTVIEKVPSRWLRKEIDDNNFSLLNDSSYYCIELYKDSKGDNNLQGIAMSDIVHDRKTKKLYLKPDFNYPDDYYTHVMYIFPGDYLRIKSTSKKSGEQLKFEGYFISVKNVNENSFRFISDNKPCAKDKRVSITKKDIVIKLAVDLMGKVQGENNGKGISCGEPLSLLKEKN

SEQ ID NO: 207 - protein, 1440 aa, Weeksella virosa
MKTILGLDLGTNSIGWALVEQDFENKQGLILGMGSRIIPMDAGIIGKFAEGSSISQTAERTGYRSIRRLRERHLLRRERLHRVLNILKFLPEHYAAEIDFEKRFGQFLAETEPKLAWKKNAEGKFEFLFQRSFDEMVADFKANGQDIKIPYDWTIYYLRKKALTQKISPQELAWIILNFNQKRGYYQLRGEEEEENPNKKVEFYSLKIVDVVADEQPNKKGDTWYSLHLENGWVYRRSSKIPLYDWKDKVRDFIVTTDINEDGSEKLDKDGEVKRSFRAPKEDDWTLIKKKTEQEIEQFNQTVGSYIYEALLDNPTQKIRGKLVRTIERKFYKSELKKILEKQIELQPELFTEDLYNACARELYRRNVAHQQQLSSRDFVYLFLNDIIFYQRPLRSQKSLISNCSLEFRTIKDKDGNGQIIYLKAIPKSNPYYQEFRVWQWLYNLKIFTKEDDKDVTNQFINKVEDLEALFEFLMNQKEVNHTDILTYLIEPIVKSKYPNAKGKAFKDELKKELKKYRWNYVYDADKDESKSYPMNETRYELRKRLDKVENVPADFMTRKIEQHLWHIIYSVTDKIEFEKALKSFANKYDLHQESFVENFKRFKPFDSDYGTYSEKAIKKLLPLMRVGKYWSWDIIDDKTKTRIGKIITGEYDETIKNRVREKAIDLTEENHFQGLQLWLAQYIVYDRHSEADIAGKWNSVADLEQYLSEFKQHSLRNPIVEQVITETLRVVRDIWKQYGKGAKDYFDEIHIELGREMKNTAEERKRLSSIISENETTNLRIRAILEELMYDENMENVRPYSPMQQEALKIYEDGVLSSSVEIPEDIEKISKKSEPTKSEIQRYKLWLEQKYRSPYTGRPIPLSKLFTPAYQIEHIIPQARFFDDGFSNKVICESEVNALKDKMLGLEFIQNYYGQKVTTSFGEVTILTEDAYKAFVKEHYDKNRSKRNKLLLEEIPEKMIDRQMNDTRYISKYISKVLSNLVRGEKDDEGVNSKNIIPGNGKITGILKQDWGLNDVWNDLILPRFERMNQLTNSTDFTAWNEKHQKFLPSVPLELSKGFQKKRIDHRHHALDALIIACATRDHVNLLNNKHAKSRNERYDLQHKLRHTTPWQDKEGKVRTKFTEFKKPWETFTQDTKKELEKIVVNFKQNLRVINKATNYYEKIVDGKKVMFKQEGVNWAIRKPMHKETVSGKIDLPRVKVSKGKILTATRKSLDTSFNAKTILSITDTGIQKILLNYLKAKGNPELAFSPEGIEEMNQNISLYNDGKPHQPILKVRVFEQGSKFPLGETGNKTTKYVEAAKGTNLFFGVYEDNQGKRSYDTIPLNIVIERQKQGLNSVPETNEKGHRLLFSLSPNDLVYVPIEGEVFDETNPDVNRIYKVVSFSGSQMFCVRQDVATSIVYKLEFSSLNKMERTIDGIMIKEICIKLKVDRLGNISKA

SEQ ID NO: 208 - protein, 1179 aa, Sphaerochaeta globosa
MSKKVSRRYEEQAQEICQRLGSRPYSIGLDLGVGSIGVAVAAYDPIKKQPSDLVFVSSRIFIPSTGAAERRQKRGQRNSLRHRANRLKFLWKLLAERNLMLSYSEQDVPDPARLRFEDAVVRANPYELRLKGLNEQLTLSELGYALYHIANHRGSSSVRTFLDEEKSSDDKKLEEQQAMTEQLAKEKGISTFIEVLTAFNTNGLIGYRNSESVKSKGVPVPTRDIISNEIDVLLQTQKQFYQEILSDEYCDRIVSAILFENEKIVPEAGCCPYFPDEKKLPRCHFLNEERRLWEAINNARIKMPMQEGAAKRYQSASFSDEQRHILFHIARSGTDITPKLVQKEFPALKTSIIVLQGKEKAIQKIAGFRFRRLEEKSFWKRLSEEQKDDFFSAWTNTPDDKRLSKYLMKHLLLTENEVVDALKTVSLIGDYGPIGKTATQLLMKHLEDGLTYTEALERGMETGEFQELSVWEQQSLLPYYGQILTGSTQALMGKYWHSAFKEKRDSEGFFKPNTNSDEEKYGRIANPVVHQTLNELRKLMNELITILGAKPQEITVELARELKVGAEKREDIIKQQTKQEKEAVLAYSKYCEPNNLDKRYIERFRLLEDQAFVCPYCLEHISVADIAAGRADVDHIFPRDDTADNSYGNKVVAHRQCNDIKGKRTPYAAFSNTSAWGPIMHYLDETPGMWRKRRKFETNEEEYAKYLQSKGFVSRFESDNSYIAKAAKEYLRCLFNPNNVTAVGSLKGMETSILRKAWNLQGIDDLLGSRHWSKDADTSPTMRKNRDDNRHHGLDAIVALYCSRSLVQMINTMSEQGKRAVEIEAMIPIPGYASEPNLSFEAQRELFRKKILEFMDLHAFVSMKTDNDANGALLKDTVYSILGADTQGEDLVFVVKKKIKDIGVKIGDYEEVASAIRGRITDKQPKWYPMEMKDKIEQLQSKNEAALQKYKESLVQAAAVLEESNRKLIESGKKPIQLSEKTISKKALELVGGYYYLISNNKRTKTFVVKEPSNEVKGFAFDTGSNLCLDFYHDAQGKLCGEIIRKIQAMNPSYKPAYMKQGYSLYVRLYQGDVCELRASDLTEAESNLAKTTHVRLPNAKPGRTFVIIITFTEMGSGYQIYFSNLAKSKKGQDTSFTLTTIKNYDVRKVQLSSAGLVRYVSPLLVDKIEKDEVALCGE

SEQ ID NO: 209 - protein, 1370 aa, Streptococcus gallolyticus
MTKKNYSIGLDIGTNSVGWAVITDDYKVPAKKMKVLGNTDKKYIKKNLLGALLFDSGETAEATRLKRTARRRYTRRKNRLRYLQEIFAEEMTKVDESFFYRLDESFLTTDEKDFERHPIFGNKAEEDAYHQKFPTIYHLRNYLADSSEKADLRLVYLALAHMIKYRGHFLIEGKLNAENTDVQKLFTDFVGVYDRTFDDSHLSEITVDVASTLTEKISKSRRLENLIKYYPTEKKNTLFGNLIALALGLQPNFKMNFKLSEDAKLQFSKDTYEEDLEELLGKIGDDYADLFTSAKNLYDAILLSGILTVDDNSTKAPLSASMIKRYVEHHEDLEKLKEFIKANKSELYHDIFKDKNKNGYAGYIENGVKQDEFYKYLKNTLSKIDGSDYFLDKIEREDFLRKQRTFDNGSIPHQIHLQEMHAILRRQGDYYPFLKEKQDRIEKILTFRIPYYVGPLVRKDSRFAWAEYRSDEKITPWNFDKVIDKEKSAEKFITRMTLNDLYLPEEKVLPKHSHVYETYAVYNELTKIKYVNEQGKESFFDSNMKQEIFDHVFKENRKVTKEKLLNYLNKEFPEYRIKDLIGLDKENKSFNASLGTYHDLKKILDKAFLDDKVNEEVIEDIIKTLTLFEDKDMIHERLQKYSDIFTANQLKKLERRHYTGWGRLSYKLINGIRNKENNKTILDYLIDDGSANRNFMQLINDDTLPFKQIIQKSQVVGDVDDIEAVVHDLPGSPAIKKGILQSVKIVDELVKVMGDNPDNIVIEMARENQTTNRGRSQSQQRLKKLQSSLKELGSNILNEEKPSYIEDKVENSHLQNDQLFLYYIQNGKDMYTGDELDIDHLSDYDIDHIIPQAFIKDDSIDNRVLTSSAKNRGKSDDVPSLDIVRARKAEWVRLYKSGLISKRKFDNLTKAERGGLTEADKAGFIKRQLVETRQITKHVAQILDARFNTEHDENDKVIRDVKVITLKSNLVSQFRKDFEFYKVREINDYHHAHDAYLNAVVGTALLKKYPKLASEFVYGEYKKYDIRKFITNSSDKATAKYFFYSNLMNFFKTKVKYADGTVFERPIIETNADGEIAWNKQIDFEKVRKVLSYPQVNIVKKVETQTGGFSKESILPKGDSDKLIPRKTKKVYWDTKKYGGFDSPTVAYSVFVVADVEKGKAKKLKTVKELVGISIMERSFFEENPVEFLENKGYHNIREDKLIKLPKYSLFEFEGGRRRLLASASELQKGNEMVLPGYLVELLYHAHRADNFNSTEYLNYVSEHKKEFEKVLSCVEDFANLYVDVEKNLSKIRAVADSMDNFSIEEISNSFINLLTLTALGAPADFNFLGEKIPRKRYTSTKECLTATLIHQSITGLYETRIDLSKLGEE

SEQ ID NO: 210 - protein, 1044 aa, Nitrosomonas sp.
MLHKMRYRLALDLGSTSLGWAMVRLNANQQPCAVIKAGVRIFSNGRNPKDGSSLAVTRREARSMRRRRDRLLKRKARMMRTLIEYGFFPANETQRKALENLNPYALRAKGLDEALTPSEFARALFHINQRRGFKSNRKTDKKDSDSGALKTAIKQLHSVLDPQGNDGKPRTVGELLYKRFTDLSKLPKDRTVRARYRQDKIVKDDGKTKIDKYYDLYIDRAMIEQEFDALWKKQSELNPILFTENARADLKDVLLYQRSLKPVKPGRCTFMSEEERAPLALPSTQRFRMYQEVNNLRILREGLKEESLTLQQRDDLINALEKNNRRTFTQIKKLLGVGGSVQFNFEDPKREELKGNTTSAILGKSEHFGEAWFAFNEAKQDAIVLQLIKEENEAKLVRWLQDETGIDEKRAEVIANAGLPEGYGSLCIEALARILPELRRDVVTYDKAVQAAGFEHHSKLNRNEEIPDITFKIESIDRNSGEIKQFHLHKELPYYGEYLQRHVGFGSGKPEDSIEKRYGKIANPTVHIGLNQVRVVVNALIKRYGHPSEIIVEVARDLKQSKDRRDEENKRQAENQKRNERLRKDIADILGISEERVRRDDIEKMILWEELSFDPADRRCPYSGVQVSTVMLLSDEVEVEHILPFSQTLDDSLNNKTVALRQANRIKGNRTPWEAFGTSNISGFDYSGILTRAELMPKAKRYRFAEDGYQRWLKDDAGFLARALNDTRHLSKIAREYMSLICPNTRVIPGQMTAMLRRNFGLNDVLGLNGEKNRNDHRHHAVDACVIAVTDQGLLQRFAAASASARERQLNRLVENMPLPWESYREHVRRAIDGIWVSHRPDHSHEGAMHNDTAYGLRGNGRVSFHKMVEGKREYIEDNLKVIEITDTKAIDRHGLLPTGKPRPYKGYKGDSNYCIEIVRNEKGRWEGEIISTFDAYQLVRKYGIVQLRYPVLSVSGKPLVMRLIRNDFVRLEHEGITRTLRVCKMREDGQVALADVTEANVDARTRTKEICYVFKTGGSLQKAKARRITISPIGELRDPGFKE

SEQ ID NO: 211 - protein, 1045 aa, Acidovorax avenae
MQKEKPLAYRLALDLGSTSLGWAVLRLSAPGEPSAVIRAGSRIFSDGRNPKDGSSLAVTRRAARAMRRRRDRLLKRKARMLAALERHGFFPQDEAARKALEKLNPYGLRARGLESALKPEEFGRALFHLNQRRGFQSNRKTDRKDSDSGALKQAIGTLRAQMHESGCRTVGEWFWKVRMERKPEGVKGQGVRARYRETPFTTDEGKKRIDKRYDLYVDRAMVAQEFDALWAAQATFAPALFNEAARAELRDILLHQRKLRPVQPGRCTLVPEEPRALLALPSTQRFRIYQEVNHLRVLHDELREEALTLAQRDQIVALLERQAKVTFTAMRKALGFSALFNLEDAKRDGLKGNATTAALGKKDLFGPLWAGFDTALQDEIVTQLMTEESEPRLIAWLQEHTGVDEARAQAIANAGLPEGYGSLGRTALARIVPELQRDVITYDKAVQAAGFAHHSDLGFSFEHDADEVERIGERTIASTGEIKPVFAFKQLPYYGRALQRHVAFAKENPRNDEERYGKIANPTVHIGLNQVRVVVNALMCRYGRPTEVVIELARDLKQSREQKLEAQQRQADNQKRNARIRRSIAEVLGISEERVRTLDIQKWILWEELSHDAADRRCPYSGVQISASMLLGERVEIEHILPFSMTLDDSLNNRTVALREANRIKRNRTPWDARTDFEAHGWSYDGILQRAERMPQRKRHRFAPDGYERWLGEDKDFLARALNDTRYLSRVAAEYLRLVCPGSATRVIPGQMTALLRGKFGLNDVLGLDGEKNRNDHRHHAVDACVIGVTDQRMMQRFAQANAQAREDGLTRLVEDMPLPWPTYRAHVERAVRHIWVSHKPDHGFEGAMMEETSYGILRDGTIKQRRKADGSAGREISRLIRITEPSQPQRHGVDAEGRPLPYKGYVGGSNYCLEITVNDKGKWEGQVISTFDAYRIVREGGLRQLRHSTQGQNGQALAMRLVIGDSVRLEVDEQERVMRIVKINGNNGQVFMAPVHEANVDARNSDKNEAFAYTSKIAGSFQKTKARQVTISPIGELRDPGFKG

SEQ ID NO: 212 - protein, 1218 aa, Prevotella denticola
MKASEEKLSKGLSTYMKENNLLTVGAAFAQLEDEGVRIRNNNNYRAIRSQFQHEIETIFMFQQGLSENELYERLVSEKKNIGTIFYKRPLRSQRGNVGKCTLERTKPRCAIGHPLFEKFRAWTLINNIKIRMSEEEQAEQLPMKLRFELYNDCFLAFVRAEFKFEDIRKYLEKRLGVHFSYNDKTINYKDSTSVAGCPITARFRKLLGEDWESFHVDGQKQRQAHGKNNASFHTVSYSTNDIWHFCYDAEEPEAVLSFAQDNLKWEKKKAEELVRIWSAIPQGYAMLSQKAIRNINKMLILGLKYSDAVLLAKVPEIVEITDGEILSVTEDYHRVEAQVGYEKQINNIVNALIAKYKSASEEYRFADHNYEYQLDKSDEKDIIKQIESNIGTRKWSLLDADEQTDILQKVRDKYQNFFRSHERKFVESPKLGECFEEYLMKKFPMVEGEQWKKLYHPSQIAIYRPVSAGKDRSALRLGNPDIGAIKNPTVLRVLNTLRKRVNQLLDDGLISPDETRVVVETARELNDANRKWALDNYNRIRHDENEKIKKILEEFYPKRDGISTDDIDKARYVIDQREMDYFTEEKPYNKDIKKYKLWLEQGGQCMYTGRTINLSNLFDPNSFDVEHTIPESISFDSSDMNLTLCDAHYNRFIKKNHIPADLPNYDKSVVIDGKEYSPIKPRLQRWADRVERLNRNVEYWRGQARRAQNKDRKDQCMREMHLWKMELEYWTKKLERFTITEVTDEFKNSQLVDTRVITRHAVLYLKSIFPHVDVQRGDVTAKFRKILGIQSVDEKKDRSLHSHHAIDATTLTIIPGAAKRERMLELFAKIEEVNKMLSFSGNEDRTGLKQELDGLKNQLNKEVKACRIGHNVSEIGTFINDNIIINHHVKNQALTPVRRRLRKRGHIVGGMDNPRWQTGDALRGEIHKASYYGAITQFAKDKDGKVLLKEGHPLVDPTIKFVIRRELKYKKSTADSGFASWDDLEKAIVDKELFALMKGQFPEETSFKDACEQGIYMIKKGKNGEVDTKLYRIRHIRCKTKQKNALKIKEQAYKSEKEYKRYFYAAVGDLYAMCCYTNGKTREFKIYSLYDISCHRKVGVEDIPEFITDKKGNRLMLDYKLHTGDMILLYKENPEELYDLDNVSLSKLLYKINGFENDGLRIRMVNHLVAKEAMGESVKDYAKLPDIIRCGVKTIKFLVMGENRDFVIKNGKISFNHR

SEQ ID NO: 213 - protein, 1458 aa, Fluviicola taffensis
MTKTILGLDLGTNSIGWALINQDFDNKKGEILGMGSRIIPMTQDIKDEFGKGNSISQTAERTRLRGVRRLIHRTLLRRERLHRVLNIIGFLPEHYANQIDFEKRFGKFKPESEPKISFDGNDVFLFEKSYQEMLVDFKIHQPQLVSNGKKIPHDWTIYYLRKKALSKKIEKEELAWILLNFNQKRGYYQLRGEEEEETPNKLVEFHSLKIVEVNADEPQKGKPEIWYSLVLENGWVYRRASKTPLFDWKDKIREFIVTTEINNDGTVKTDKEGTEKRSFRAPKPEDWTLQKKKTEFELSKSGNEVGAFIYESILQKPNQKIRGKLISTIERKFYKEELKTILKTQLFFHKELKDEKLYNACIEELYKNNEAHRSLLSNKGFEHLFINDILFYQRPLRSKKSQISNCPLEKRTYKKEGIEITEGIKVISKSNPIYQEFRLWQWISNLSLYCIEPTETNVTSTFLNSIEDYENLFEFLNNRKEIEQKHLLKYLLENQGFKGKLLTNELEKFRWNFVADKKYPCNETGSLLHTRLSKVKNISPDFLTKEIEHQLWHIIYSVTDKIEYEQALKTFARKNNLDVDSFFEHFKKIPPFESTYGAYSEKAIKKLLPLIRLGKYWNWEAIDSISKDRISKILSGEYDENIKNRVREKAVHLTSENNFQGLQEWLAKYIVYDRHSEGNDLGKWTSVSDLETYLKEFKQHSLRNPIVEQVITETLRVVKDIWIKHGKGTENFFDEIHVELGREMKNNSEDRKRLTNTITENENTNLRIKALLMEMMNDNDVENVRPYSPSQQEILKIYEDGALNSNIELDDEIVKISKKAEPTKSELQRYKLWLEQKYRSPYTGQVIPLNKLFTSEYEIEHVVPQSRFFDDSFSNKVICESAVNKRKDNQLGLQFIKNHSGEKVELGFGKVVQVFTEEQYLDFVKEHYSKNRSKHNKLLLEEIPEKMIERQLNDTRYISKFVSSILSNIVRSEKDDDGLNSKNILPGNGKITTELKRDWGLNDVWNDLILPRFERMNTITNSDLFTTYNDKYQKHLPTVPFEYSKGFQKKRIDHRHHAMDALVIACATRDHLNLMNNQSAKSELKRYDLQNKLRKKEPYFNQKENKQKEAFKDFIKPWGTFTEDSKNALEKIIISFKQNLRVINKATNSYESYKDEDGNLRIGKDGKPEKGLIKQKGLNWAIRKPLHKDTVSGQINLSRIKLPNGKILTATRKNLDTSFDLKTIENSITDTGIQKILKNYLLSKESPELAFSPEGLEEMNNEIEKYNNGKFHHPINKARIYELGSKFNVGQTGNRRDKFVEAAKGTNLFFAIYQDENKNRSYETIPLNEVIEHQKWRASLPKEEQEKIPLVPVNKLKGTFIFSLSPNDLVYVPSNDELERSASIDFSKLKKEQINRLYKMVSSSGSQCFFVKSEVATSVVNKMEYSSLNKMEKSIDNLMVKEICIKLKIDRLGNISKA

SEQ ID NO: 214 - protein, 1384 aa, Coriobacterium glomerans
MKLRGIEDDYSIGLDMGTSSVGWAVTDERGTLAHFKRKPTWGSRLFREAQTAAVARMPRGQRRRYVRRRWRLDLLQKLFEQQMEQADPDFFIRLRQSRLLRDDRAEEHADYRWPLFNDCKFTERDYYQRFPTIYHVRSWLMETDEQADIRLIYLALHNIVKHRGNFLREGQSLSAKSARPDEALNHLRETLRVWSSERGFECSIADNGSILAMLTHPDLSPSDRRKKIAPLFDVKSDDAAADKKLGIALAGAVIGLKTEFKNIFGDFPCEDSSIYLSNDEAVDAVRSACPDDCAELFDRLCEVYSAYVLQGLLSYAPGQTISANMVEKYRRYGEDLALLKKLVKIYAPDQYRMFFSGATYPGTGIYDAAQARGYTKYNLGPKKSEYKPSESMQYDDFRKAVEKLFAKTDARADERYRMMMDRFDKQQFLRRLKTSDNGSIYHQLHLEELKAIVENQGRFYPFLKRDADKLVSLVSFRIPYYVGPLSTRNARTDQHGENRFAWSERKPGMQDEPIFPWNWESIIDRSKSAEKFILRMTGMCTYLQQEPVLPKSSLLYEEFCVLNELNGAHWSIDGDDEHRFDAADREGIIEELFRRKRTVSYGDVAGWMERERNQIGAHVCGGQGEKGFESKLGSYIFFCKDVFKVERLEQSDYPMIERIILWNTLFEDRKILSQRLKEEYGSRLSAEQIKTICKKRFTGWGRLSEKFLTGITVQVDEDSVSIMDVLREGCPVSGKRGRAMVMMEILRDEELGFQKKVDDFNRAFFAENAQALGVNELPGSPAVRRSLNQSIRIVDEIASIAGKAPANIFIEVTRDEDPKKKGRRTKRRYNDLKDALEAFKKEDPELWRELCETAPNDMDERLSLYFMQRGKCLYSGRAIDIHQLSNAGIYEVDHIIPRTYVKDDSLENKALVYREENQRKTDMLLIDPEIRRRMSGYWRMLHEAKLIGDKKFRNLLRSRIDDKALKGFIARQLVETGQMVKLVRSLLEARYPETNIISVKASISHDLRTAAELVKCREANDFHHAHDAFLACRVGLFIQKRHPCVYENPIGLSQVVRNYVRQQADIFKRCRTIPGSSGFIVNSFMTSGFDKETGEIFKDDWDAEAEVEGIRRSLNFRQCFISRMPFEDHGVFWDATIYSPRAKKTAALPLKQGLNPSRYGSFSREQFAYFFIYKARNPRKEQTLFEFAQVPVRLSAQIRQDENALERYARELAKDQGLEFIRIERSKILKNQLIEIDGDRLCITGKEEVRNACELAFAQDEMRVIRMLVSEKPVSRECVISLFNRILLHGDQASRRLSKQLKLALLSEAFSEASDNVQRNVVLGLIAIFNGSTNMVNLSDIGGSKFAGNVRIKYKKELASPKVNVHLIDQSVTGMFERRTKIGL

SEQ ID NO: 215 - protein, 1077 aa, Neisseria bacilliformis
MQQKPQRYILGLDLGIASVGWACVWADENEHPTGLLDCGVRTFERAEVPKTGDSLALARRQARSVRRLIRRRAHRLLRLRRLLKREGVLLSADFNENGLVRGLPIDAWALRVAGLDRKLSNKEWAAVLLHLVKHRGYLSQRKNETQSKDKELGRLLAGVNGNREALQNRSDEYRTAAELAVKKFAAENNGSLRNKGGDYSHTFDRKDLQRELHLLFERQRALDNPFTSSEMEAAVDELLMKQRSALQGEAVLKMLGRCTFEPSEYKAAKNTYSAERFVWLTKLNNLRIQYNGEERALSEAERRLLLDEPYQKAKLTYKQVRTILELPESAVFKGLRYGHGEDGLKAESGTLMEMKAYHAVRKALKDAGLEGEWENRIRNPELLDAIGTAFSLYKTDEDIRANLAAFRLSENVLEALLAGLNFDKFVHLSLKALAKILPLMEQGMRYDEACKEAYGDHYGAKEQEDHRLLPPFVADDIRNPVVFRTLTQARKIVNEIVRRYGSPLRVHIETGREVGKSFSDRKEIEKRQEENRKERERAAAHFKELFPNFAGEPKAQDILKLRLYEQQHGKCLYSGKEIDLRRLPEKGYVEIDHALPFSRTWDDSFNNKVLVLGKENQDKRNRTPYEYLDGKGNSGAWRAFAERVSGCRFPYAKKQRLLTQKLDEKTEQGFLERNLNDTRYVARFLCQFIEEKMHLEGAGKKRVFASNGQITALLRGFWGLKKVREENDRHHALDAVVVACSSVSMQQKITRHFRYREELEHIDRETGEVIHGFPQPWEFFRQEVMTRVFSDDPVSELAEKLDSRPEAVHEFVTPLFVSRAPHRKVTGQGHLETIRSAKRLDEKISVVKLPLTQLKTKDIERIVGYPNREPALYDALAARLAAFKDDPAKAFSEPFYKTGKDGKCGVLVKAVRVENVQKSGLLVRKDESGKMQGVADNATMVRVDVFGKNGKNYLVPVYAWQVEKGELPNRAVVAYADEEDWDEMDDSFEFKFSLYPNDLVEVVTKKDKFFGYYSGFNRATGAINIKEHDLSKSKVKNGVYEGIGVKTAQSFQKYQVDTLGKTIRLCKPEKRMGFKKK

SEQ ID NO: 216 - protein, 1029 aa, Alicycliphilus denitrificans; identical to SEQ ID NO: 193

SEQ ID NO: 217 - protein, 1122 aa, Streptococcus suis; identical to SEQ ID NO: 87

SEQ ID NO: 218 - protein, 1428 aa, Parasutterella excrementihominis
MGKTHIIGVGLDLGGTYTGTFITSHPSDEAEHRDHSSAFTVVNSEKLSFSSKSRTAVRHRVRSYKGFDLRRRLLLLVAEYQLLQKKQTLAPEERENLRIALSGYLKRRGYARTEAETDTSVLESLDPSVFSSAPSFTNFFNDSEPLNIQWEAIANSPETTKALNKELSGQKEADFKKYIKTSFPEYSAKEILANYVEGRRAILDASKYIANLQSLGHKHRSKYLSDILQDMKRDSRITRLSEAFGSTDNLWRIIGNISNLQERAVRWYFNDAKFEQGQEQLDAVKLKNVLVRALKYLRSDDKEWSASQKQIIQSLEQSGDVLDVLAGLDPDRTIPPYEDQNNRRPPEDQTLYLNPKALSSEYGEKWKSWANKFAGAYPLLTEDLTEILKNTDRKSRIKIRSDVLPDSDYRLAYILQRAFDRSIALDECSIRRTAEDFENGVVIKNEKLEDVLSGHQLEEFLEFANRYYQETAKAKNGLWFPENALLERADLHPPMKNKILNVIVGQALGVSPAEGTDFIEEIWNSKVKGRSTVRSICNAIENERKTYGPYFSEDYKFVKTALKEGKTEKELSKKFAAVIKVLKMVSEVVPFIGKELRLSDEAQSKFDNLYSLAQLYNLIETERNGFSKVSLAAHLENAWRMTMTDGSAQCCRLPADCVRPFDGFIRKAIDRNSWEVAKRIAEEVKKSVDFTNGTVKIPVAIEANSFNFTASLTDLKYIQLKEQKLKKKLEDIQRNEENQEKRWLSKEERIRADSHGICAYTGRPLDDVGEIDHIIPRSLTLKKSESIYNSEVNLIFVSAQGNQEKKNNIYLLSNLAKNYLAAVFGTSDLSQITNEIESTVLQLKAAGRLGYFDLLSEKERACARHALFLNSDSEARRAVIDVLGSRRKASVNGTQAWFVRSIFSKVRQALAAWTQETGNELIFDAISVPAADSSEMRKRFAEYRPEFRKPKVQPVASHSIDAMCIYLAACSDPFKTKRMGSQLAIYEPINFDNLFTGSCQVIQNTPRNFSDKTNIANSPIFKETIYAERFLDIIVSRGEIFIGYPSNMPFEEKPNRISIGGKDPFSILSVLGAYLDKAPSSEKEKLTIYRVVKNKAFELFSKVAGSKFTAEEDKAAKILEALHFVTVKQDVAATVSDLIKSKKELSKDSIENLAKQKGCLKKVEYSSKEFKFKGSLIIPAAVEWGKVLWNVFKENTAEELKDENALRKALEAAWPSSFGTRNLHSKAKRVFSLPVVATQSGAVRIRRKTAFGDFVYQSQDTNNLYSSFPVKNGKLDWSSPIIHPALQNRNLTAYGYRFVDHDRSISMSEFREVYNKDDLMRIELAQGTSSRRYLRVEMPGEKFLAWFGENSISLGSSFKFSVSEVFDNKIYTENAEFTKFLPKPREDNKHNGTIFFELVGPRVIFNYIVGGAASSLKEIFSEAGKERS

SEQ ID NO: 219 - protein, 1371 aa, Lactobacillus buchneri
MKVNNYHIGLDIGTSSIGWVAIGEDGKPLRIKGKTAIGARLFQEGNPAADRRMFRTTRRRLSRRKWRLKLLEEIFDPYITPVDSTFFARLKQSNLSPKDSRKEFKGSMLFPDLTDMQYHKDYPTIYHLRHALMTQDEKFDIRMVYLAIHHIVKYRGNFLNSTPVDSFKASKVNFVDQFKKLNELYTAINPEESFQINLANSEDIGHQFLDPSIRKFDKKKQIPKIVPVSVDDKATDKINGKIASEIINAILGYKSKLDVVVQCTPVDSKSWALKFDEEDIDAKLQKILPEMDENQQSIIAILQNLYSQVTLNQIVPNGMSLSESMIEKYNDHHDHLKLYKKIIDQLADPKKKAALKKAYSQYVGDDGKVIEQADFWSSVKKNLDDSDLSKQIMDLIDAEKFMPKQRTSQNGVIPHQLHQRELDEIIEHQSKYYPWLAEINPNKHDLHLAKYKIEELVAFRVPYYVGPMITPDDQAKSAETVFSWMERKGKEAGQITPWNFDEKVDRNASANRFIKRMTTKDTYLIGEDVLPDESLLYEKFKVLNELNMVRVNGKLLKVADKQAIFQDLFENYKHISVKKLQNYIKSKTGLPSDPEISGLSDPEYFNNSLGTYNDFKKLFGNKVDEPDLQDDFEKIVEWSTVFEDKRILREKLNEITWLSDQQKDVLESSRYQGWGRLSKKLLTGIVNDQGERIIDELWNTNKNFMQIQSDNDFAKRIHEANADQMKAVDVEDVLADAYTSPQNKKAIRQVVKVVDDIQKAMGGVAPKYISIEFTRSEDRNPRRTISRQRQLENTLKDTAKSLAKSINPELLSELDNAAKSKKGLTDRLYLYFTQLGKDIYTGKPINIDEISTYDIDHILPQAFVKDDSLNNRVLVSKAINNGKSDNVPVQLFGAKMGHFWKQLAEAGLISKRKLKNLQTDPDTISKYAMHGFIRRQLVETSQVIKLVANILGDKYRNDNTKIIEITARMNHQMRDEFGFIKNREINDYHHAFDAYLTAFLGRYLYHRYIKLRPYFVYGDFKKFKEDKVTMRNFNFLHDLTDDTQEKIADAETGEVIWDRENSIQQLKDVYHYKFMLISHEVYTLRGAMFNQTVYPASDAGKRKLIPIKADRPINVYGGYSGSADAYMAIVRIHNKKGDKYRVVGVPMRARDRLDAAKKVSDADCDRALKDVLTPQLTKTKKSRKTGEITQVVEDFEIVLGKVMYRQLMIDGDKKFMLGSSTYQYNAKQLVLSDQSVKTLASKGRLDPLQESMDYNNVYTEILDKVNQYFSLYDMNKFRHKLNLGFSKFISFPNHNVFDGNTKASSGKREILEEVLNGLHANPTFGNLKDIGITTPFGQLQQPNGILLSDEAKIRYQSPTGLFERTVSLKDL

SEQ ID NO: 220 - protein, 1090 aa, Sphingomonas sp.
MDWRLGLDLGANSLGWAALRLDRAGDPIGILAMGSRIFSDGRDPKSGASLAVDRRAARAMRRRRDRFKQRQAALLKYLIRDGLFPADQADRQRLADEDPYALRARALDEELSLFEIGRALFHLNQRRGFQSNRKADRGQDDEAGKIAVGVDRLNQQMEEQGARTLGEFLHQRRRAATDANHIPSVRTRLRPETGEGAKGDGYDFYPSRALIAEEFEEIWAAQAPHYPDTLTQQVHDRLYEIIFHQRPLRAPQVGQCTLVAGETRLPKAHPLFQKRRLLEEINALMIVRPGEIAQRLTPEERDTLYLKLKDKRTVSFATLRKTLKLDSAARFNKESENRTELKGDEVAAELGAKTRLGTRWQHLSGDQQWEVVHRLMALESQADEAAFRDWISQTYDLLPEQAAAVLGARLPQGHGRFGPTATTTLIDSLLHDRTEDGRVVVYSEAVQRSGLGHHSDLRHDRDDEDVTELPYYGVALERHIMPGTAEPTDPEEMRIGRLTNPTVHIGLNQLRHVVNRLIRAYGPPKEIAIELARELKLSEDEKKKRNSENRDNRLAAEGRSKKLEEIRQRDTGANRALLKLWEELNPGNVLDRRCIYTGEQISIDMLFSDRVEVDHILPFAQTLDDSNGNKLLCLREANREKRRRSPYEAWGHTDRWPDIAERASRLPKPKRWRFEPDAMQRFATEDGFLARHLVDTQYLGRLAREYLSWLYPGRGEGSGHVWVSPGRLTEMVRRKLGLNDLLPDHNFGGGADQPKNRLDHRHHAIDALVVAIVDRGMLQAIARASGQDGSEGRERIHIPAPWDGFRDDLRVAVNGIIVSHRPDHGTVAKAGLARGRDQTAGRLHNDTAYGLTGETDAKGNSIVVRRIPLSAIKKPADIARVRDPLLRNALAEFTKGLDGKAFEARIGRFHELGPLLYRGIRRVRVVETLTVIPIRDAEGRAYKGYKGDSNYRYDVWEMPDGKWRCQVVSMFDAHQSTEQARPHPAARKILSLQRNDILAIERTEGDRELVRVVKFSEKQFAVAPPHEGGSLKTRDGNADDPFRYLYPSPNTLKGWRARQVRIDELGRVLDPGFPARKSVRRTRPRAAPVD

SEQ ID NO: 221 - protein, 1000 aa, Kingella kingae
MARAQRRLISRRANRMNKLRRLLKQENVLQANDYDEKGLIIGLPNQAWELRAQGLDRKLEPKEWAAVLINLVKHRGYLSQRKNESQTADKELGALLSGMNHNHQLLQSQSNQYRTPAELAIKQFATQDGHIRNQRGAYTHTFNRLDLQNELNQLFDAQTRLGNPHVSGSLKTAINDLLMNQKAALSGDAILEMLGRCTFEPSEYKAAKNTYSAERFVWLGKLTNLRIQDNGLESALSREQRELLLNEPYNKTKLTYQQVRKLLRLPETAFFKGLRYGKDNAESATFMEMKSYHAIRKSLENKSLKSEWEKLKTQPKLLDLIGTAFSIYKTDDEIAGCLKNQLPENVIIALQEQLNFSNFMELSLKALEKLLPLMEQGLRYDEACTQIYGNRHEKIADKTEKFLPNIPADKLRNPVVLRTLTQARKVINAIIRRYGSPARVHIETGREVGKSFSDRDKLKKQQEENQEQRRRAIDEWKQFFPNAAHEPKAVDILKLRLYQLQQGKCLYSGLPIDVRRLPEKGYVEIDHALPFSRTWDDSFNNKILVLASENQNKGNQTPYEYLRGADNSESWRLFVENVQNCQFSPNKKQKIMAKQLDEKGFLERNLNDTRYVSRFLCQFISEHLHLTGKGKKRVFASNGQITALLRGRWGLSKNREENDRHHAVDAVVVACSTVAMQQKITQFVRYQKGNVFTGERIDKETGEVISIHFPTPWEHFREEVMIRVFDDNPLRTLPEKLPNRPEALHEYVMPLFVSRMPTRKMTGQGHKETIKSAKRLDEKISVLRVPLTQLKLNDLENMVNREREPALYEALKARLEQFKNDPAKAFAEPFFKQGGQQVKAVRVEIVQKSGMLLRKINGVADNGSMVRVDVFEKSGKFYLVPIYAWQVAEGILPNYAVVAHKDESDWILMDESYHFKFALYKNDLLEVQTKKGGIMGYFASLDRATGAITIREHDRDKKKCKDGEHRSIGVKMASSFKKLQVDELGKNIHETRSRKRPNIG

SEQ ID NO: 222 - protein, 1130 aa, Streptococcus pasteurianus
MTNGKILGLDIGIASVGVGIIEAKTGKVVHANSRLFSAANAENNAERRGFRGSRRLNRRKKHRVKRVRDLFEKYGIVTDFRNLNLNPYELRVKGLTEQLKNEELFAALRTISKRRGISYLDDAEDDSTGSTDYAKSIDENRRLLKNKTPGQIQLERLEKYGQLRGNFTVYDENGEAHRLINVFSTSDYEKEARKILETQADYNKKITAEFIDDYVEILTQKRKYYHGPGNEKSRTDYGRFRTDGTTLENIFGILIGKCNFYPDEYRASKASYTAQEYNFLNDLNNLKVSTETGKLSTEQKESLVEFAKNTATLGPAKLLKEIAKILDCKVDEIKGYREDDKGKPDLHTFEPYRKLKFNLESINIDDLSREVIDKLADILTLNTEREGIEDAIKRNLPNQFTEEQISEIIKVRKSQSTAFNKGWHSFSAKLMNELIPELYATSDEQMTILTRLEKFKVNKKSSKNTKTIDEKEVTDEIYNPVVAKSVRQTIKIINAAVKKYGDFDKIVIEMPRDKNADDEKKFIDKRNKENKKEKDDALKRAAYLYNSSDKLPDEVFHGNKQLETKIRLWYQQGERCLYSGKPISIQELVHNSNNFEIDHILPLSLSFDDSLANKVLVYAWTNQEKGQKTPYQVIDSMDAAWSFREMKDYVLKQKGLGKKKRDYLLTTENIDKIEVKKKFIERNLVDTRYASRVVLNSLQSALRELGKDTKVSVVRGQFTSQLRRKWKIDKSRETYHHHAVDALIIAASSQLKLWEKQDNPMFVDYGKNQVVDKQTGEILSVSDDEYKELVFQPPYQGFVNTISSKGFEDEILFSYQVDSKYNRKVSDATIYSTRKAKIGKDKKEETYVLGKIKDIYSQNGFDTFIKKYNKDKTQFLMYQKDSLTWENVIEVILRDYPTTKKSEDGKNDVKCNPFEEYRRENGLICKYSKKGKGTPIKSLKYYDKKLGNCIDITPEESRNKVILQSINPWRADVYFNPETLKYELMGLKYSDLSFEKGTGNYHISQEKYDAIKEKEGIGKKSEFKFTLYRNDLILIKDIASGEQEIYRFLSRTMPNVNHYVELKPYDKEKFDNVQELVEALGEADKVGRCIKGLNKPNISIYKVRTDVLGNKYFVKKKGDKPKLDFKNNKK

SEQ ID NO: 223 - protein, 1119 aa, Lactobacillus coryniformis
MGYRIGLDVGITSTGYAVLKTDKNGLPYKILTLDSVIYPRAENPQTGASLAEPRRIKRGLRRRTRRTKFRKQRTQQLFIHSGLLSKPEIEQILATPQAKYSVYELRVAGLDRRLTNSELFRVLYFFIGHRGFKSNRKAELNPENEADKKQMGQLLNSIEEIRKAIAEKGYRTVGELYLKDPKYNDHKRNKGYIDGYLSTPNRQMLVDEIKQILDKQRELGNEKLTDEFYATYLLGDENRAGIFQAQRDFDEGPGAGPYAGDQIKKMVGKDIFEPTEDRAAKATYTFQYFNLLQKMTSLNYQNTTGDTWHTLNGLDRQAIIDAVFAKAEKPTKTYKPTDFGELRKLLKLPDDARFNLVNYGSLQTQKEIETVEKKTRFVDFKAYHDLVKVLPEEMWQSRQLLDHIGTALTLYSSDKRRRRYFAEELNLPAELIEKLLPLNFSKFGHLSIKSMQNIIPYLEMGQVYSEATTNTGYDFRKKQISKDTIREEITNPVVRRAVTKTIKIVEQIIRRYGKPDGINIELARELGRNFKERGDIQKRQDKNRQTNDKIAAELTELGIPVNGQNIIRYKLHKEQNGVDPYTGDQIPFERAFSEGYEVDHIIPYSISWDDSYTNKVLTSAKCNREKGNRIPMVYLANNEQRLNALTNIADNIIRNSRKRQKLLKQKLSDEELKDWKQRNINDTRFITRVLYNYFRQAIEFNPELEKKQRVLPLNGEVTSKIRSRWGFLKVREDGDLHHAIDATVIAAITPKFIQQVTKYSQHQEVKNNQALWHDAEIKDAEYAAEAQRMDADLFNKIFNGFPLPWPEFLDELLARISDNPVEMMKSRSWNTYTPIEIAKLKPVFVVRLANHKISGPAHLDTIRSAKLFDEKGIVLSRVSITKLKINKKGQVATGDGIYDPENSNNGDKVVYSAIRQALEAHNGSGELAFPDGYLEYVDHGTKKLVRKVRVAKKVSLPVRLKNKAAADNGSMVRIDVFNTGKKFVFVPIYIKDTVEQVLPNKAIARGKSLWYQITESDQFCFSLYPGDMVHIESKTGIKPKYSNKENNTSVVPIKNFYGYFDGADIATASILVRAHDSSYTARSIGIAGLLKFEKYQVDYFGRYHKVHEKKRQLFVKRDE

SEQ ID NO: 224 - protein, 1126 aa, Lactobacillus farciminis
MADRISLGLDIGVASVGFSVLDIDKGKVIELGARLFSATVAAGNQDRRDMRGARRLLNRNKQRRQDTGKLFKKFGLIDDFDKGSFYDNFNQNLNPYELRVKGLTEQLTKEELAESLYQIVKHRGISYALKDADVDEGGTDYSVSLKINSQELAEKTPAQIQLQRLNDYGKVRGQVVIGDDPDNQKVLLNVFPTSAYEKEAKQIIATQQQFYPESLTDKFTEEYCQILTRKRDYFVGPGNEKSRTDYGIYKTDGRTLDNLFEELIGHDKIYPEELRASAASYTAQLFNVLNDLNNLRILNYEDGKLTKEDKEKIIAEIKNNTTTINMLNVIKKVAGCSKDDIKGFRVNEKDKPEISSMPVYRKIHKDLLKAGVDISDWPVEFIDELSFILTLNTENGEIRKQLNNRLAPKFDFLNADLIQLIIDNKDSFEIKTNNKWHRFSVKTMNKLIPEMMERPVEQMTLLNEMGLVKKDKKRFENNKYLPYKEIAKDIFNPVASKSVREALKIVNAVLKKYGHIDYLVVEMPRDKNLKEEQDNIKEFQNKNKKAKDAAFEAFVKSVGSEQRVKEALSKNRKLQMKMRLWYQQQEIDPYNGKTIDATDLINNPDKFEIDHIIPQSISFYDSINNKTLCFASMNQVKGQKTPYEFMLEGHGQSYDKFKATVMANKNFGKAKRANYLFEENVSDIETRKRFLSRNLVDTRYSSRVVLNSLQDFFREKSADTKVTVIRGKFTSNMRKHWHIDKTRETFHHHAIDASIIAATPFLRMWKKGGTIFPVKVGEESIDIETGEILDDKNFDKAMYEEPYSGFVSEIMNADDRIKFSHQVDKKMNRKVSDATIYSTRTGKLAKDKKDAEYIVAKVKDIYSVDGFKKFKKVYDKDKTKFLLYKYDPRTFSKLERIISDCPDKVEKVQTNGKVKAVDISPFEMYRRDHGMIKKYSKKGNGPAIKQLKYLDKKLGSHIDITPANANGKHVILQSLKPWRTDVYLNHETGEYEIMGIKYSDLKFNKNEGYGIKKDKYLEIKKVEEVSEKSEFMFSLYRKDRVKVQDMKTGESVELLFWSRNFSNKKYAELKPISQAENDKKLPVYGKGRLIKRLIPKNCKIWKVNTTILGDPYYLEKESDSPKDILD

SEQ ID NO: 225 - protein, 1380 aa, Eggerthella sp.
MNLRHVGNYNIGLDMGTASVGWAAIDEQGELLHFKGKPTWGSRLFDSANTAATARMPRGQRRRYIRRRWRLDLLQKFFSEEMAEKDPEFFIRLRQSSLWPEDREGGHTAYHWPLFNDSDFNEKEYYEKFPTIFHLRQWLMETDEKADIRLIYLAFHNIVKHRGNFLQENNDSLSAQNANMRESLESFCIALEEWCDEKELTCSCDPQKLEHLFKEVKYRSDIRDGFAALLGLACSGENEVDVKAMAKEMGKAIVGYKADFSKIFTECDKEGSSFRLSDDEGPEAFLDICPDDGIALFEAIQMVYSSFILTGMLTEKGLSLSKISAYNQYGQDLESLKALVKEYVPNEYSSFFRGPTYSGSTEYDPSKAQGYTRYNLGPSKKGSGAKPMAYEDFKKSVEQLFANTNAINDERYKEMMGRFAEEKFLRRLRTSDNGRIPFQLNLEEMTAIIINQGKYYPFLLEQQEKLESLVRFRIPYYVGPLTRINARLDSKGNACFAWSKRKDGMDSASIKPWNWDEVIDKHASAQAFIERMTGTCTYLRGEPVLPRCSLLYEEYCVLNELNGARWTQDGDKFIRFDYKDRSDIIEELFKKRRGRIQYAAVADWMKQERSHANVHVSGGQGENAFESRLSSYHFFCNDVFGVDELPGSYVDMVEEIILWSTLFEDRSILREEIQRKYGDVLNEEQIKTICKKRFSGWGRLSRKLLCSLKAQTDNGPKSIMDILQEGDQNNGRVGRAMVFQEILHDEQLGFEQKIEEENTQSMLEGENLLIEDLPGSPAIRRSINQAVRIVDEIVGIAGHAPDNIFIEVTREDDTKKKGKRTTTRYSNIQKALEALKEEGAEALRELKTYKHNELDKRLSLYFMQNGKSLYSGIPLDIRRLSEYQIDHIIPQSYIKDDSYENMALVLPGENQSKADNLLISQDIRIKMKATWTALHKAGLMGDKKYNNLMNSSISDAKMKGFINRQLVETSQSVKLTQMMLSQKYPGAKVRPIKASISSQLRDACDLVKCREANDYHHAHDAYLACQVGRFVLKRHSSMFDNPIGMTKVIRDFVKRQGQEFKRNGKLPAYASRSGFIVQSFMRSGFDAETGELLRDDWNAPFEIARIKRCLNYRDCYISRMPMEDSGAFWDATIYSPKAGKKGALPVKQGLPVEKYGSYSREQFAYFFVYKAYNPKKKAYRLEFEAVPVRVASAVETRENALEEYAKSVAKQAGLEFVEVARPKVYKYQLIELGEDRLYITGKREVRNASQLAFSLDEIDLLKRLAEGEETSSEERERLFDVLIEKYARYAPRLARQLSVDSMSATFETLNAEEQLGILLSLVEIANGKRNMIDLSSAGGSKNAGCMNPTFSSELSSPGSNFTFIDQSVTGMFERRQRLEL

SEQ ID NO: 226 - protein, 1430 aa, Capnocytophaga canimorsus
MKHILGLDLGTNSIGWAVVKEAQNDNEQSEIVDVGVRVNPLTTDEKTNFEKGKPISTNADRTLKRSARRNLQRYKLRRKELIELLKEHQLISTDTILTENGKGTTFQTLELRAKSAKEKISLEELARVFLTINKKRGYKSSRKAKNEDEGQLIDGMEIAKRLYEENLTTGQLSLQLLKEGKKSLPDYYRSDLQFELDKVWNFQKQFHSHILTDEFYAQLKGKGQRATSALFLAKYQIYTAENKGSREDKKLQAYQWRVDALSKELTREQLAFVITEINNNLNNSSGYLGAISDRSKELYFNNETVGEYLWKQIAANPHTSLKNQVFYRQDYLDEFEQIWKTQSAFYPEILTDELKKELRDVVIFYQRKLKSQKSLVSFCEFENKEIEIKKEDGTSTKKVIGLKVAPKSSPLFQEFKIWQNLNNVLIRKKGSKTKKVDKNQQAVLFEEEKTIFELDLEAKQALFNELNLKGNLKAYYCLEILGYSPKEWEMNYSVLEGNRTNKALYEAYLKITDLEGYDAKNHLKVKLNKDEVELDDLKVPASEIKDMVQAIFKEAGINTDILHFNAELDGKDFENQASYQLWHLLYSYEGDDSKSGNELLYKLLETKFGFKKEYAQILANVSLSDDYGSLSTKAMRKIHPYIKENKFSTACELAGYRHSKHSLTKEENDNRVLKDSLEVLKKNSLRQPVVEKILNQMINLVNALLKKYRTENPNFKFDEIRIELARELKKNAEERANMTVNINKAKTEHEKIIKILKNEFGLPNPTRNDIIRYRLYEELKANGYKDLYTNEYIEKQDLFTKNIDIEHIIPKSRVFDDSFSNKTLSFRKTNLDKGERTAFDYIESKFGADKLEEYVARVEDLYKNNIISKAKYQKLLKKESEIGDGFVERDLRETQYIAKKAKEILLQITPNVLSTSGGITDRLREDWDLINVMKELNLPKYRALGLTQMEDRKYGQQVEVIIDWTKRNDHRHHAMDALTVAFTKHNHIQYLNYLNARKNEKHREHSNIMGIQQLETIKVTDKNGNEKRVFKAPMPNFRQVTKAFLENVLISHKAKNKVVTKNKNKVAGSNKVQEVLTPRGQLHKETVYGKYQYYVQKEEKIGGKFDLETIKKVANPLYQSLLKKRLEENGGDPKKAFTGKNSLAKNPIYLDDAQTEQLPEKVKLVWLENSFSIRKDITPENFKDEKLIDKILDEGVKRILKERLQSFGNDAKKAFSDLDKNPIWLNKEKGIAIKRVAISGVANAEPLHTKKDHLGKEILDKEGKSIPVDFISTGNNHHVAVYRDEKGNLQEKVVSVFEAVVRANQGLPIIDKTYNQHLGWEFLFTMKQNEMFVFSNESTGFNPNDIDLLDPKNKKIISPNLFRVQKFSKLQYGNSFVREFVFRHHLETTVEDRKELQGITYKQMKNSAFFNDIIKVRINHLGGIVSVGEY

SEQ ID NO: 227 - protein, 1348 aa, Finegoldia magna
MKSEKKYYIGLDVGTNSVGWAVTDEFYNILRAKGKDLWGVRLFEKAKTAADTRTFRSGRRRNDRKGVRLQILREIFEDEIKKVDKDFYDRLDESKFWAEDKKVSGKYSLFNDKNFSDKQYFEKFPTIFHLRKYLMEEHGKVDIRYYFLAINQMMKRRGHFLIDGQISHVTDDKPLKQQLILLINDLLKIELEEEFMDSIFEILADVNEKKTEKKNILKELINAQDFNKQEGKILYSIFESIVTGKAKIKNIISDEDILEKIKEDNKEDFVLTGDSYEENLQYFEEVLQENITLFNTLKSAYDFVILQSILKGKSTLSDAQVERYDEHKKDLEILKKVIKKYDEDGKLFKQVFKEDNGNGYVSYIGYYLNKNKKITAKKKISNIEFTKYVKGILEKQCDCEDEDVKYLLGKIEQENFLLKQISSINSVIPHQIHLFELDKILENLAKYYPSFNNKKEEFTKIEKIRKTFTFRIPYYVGPLNDYHKNNGGNAWIFRNKGEKIRPWNFEKIVDLHKSEEEFIKRMLNQCTYLPEETVLPKSSILYSEYMVLNELNNLRINGKPIDTDVKLKLIEELFKKKTKVTLKSIRDYMIRNNFADKEDFDNSEKNLEIVSNMKSYIDFNNILGDKFELEMVEDLIEKITIHTGNKKLLKKYIEETYPDLSSSQIQKIINLKYKDWGRLSRKLLDGITGTNIETGEIDTVINFLRNSSDNLMQIIGSQNYSFNNDIDKLRKKYIPQEISYEVVENLYVSPSVKKMIWQVIRITEEITKVMGYDPDKIFIEMAKSEEGKKTTISRKNKLLALYKAIKKDERDSQYEKLLTGLNKLDDSDLRSRKLYLYYTQMGRDMYTGEKIDLDKLFDSTHYDKDHIIPQSMKKDDSIINNLVLVNKNANQTTKGNIYPVPSSIRNNPKIYNYWKYLMEKEFISKEKYNRLIRNTPLTNEELGGFINRQLVETRQSTKAIKELFEKFYKKSKIIPVKAILASDLRKDMNTLKSREVNDLHHAHDAFLNIVAGDVWNREFTSNPINYVKENREGDKVKYSLSKYFTRPRKSKGKVIWTPEKGRKLIVDTLNKPSVLISNESHVKKGELFNATIAGKKDYKKGKIYLPLKKDDRLQDVSKYGGYKAINGAFFFLVEHTKSKKRIRSIELFPLHLLSKFYEDKNTVLDYAINVLQLQDPKIIIDKINYRTEIIIDNFSYLISTKSNDGSITVKPNEQMYWRVDEISNLKKIENKYKKDAILTEEDRKIMESYIDKIYQQFKAGKYKNRRTTDTIIEKYEIIDLDTLDNKQLYQLLVAFISLSYKTSNNAVDFTVIGLGTECGKPRITNLPDNTYLVYKSITGIYEKRIRIK

SEQ ID NO: 228 - protein, 1352 aa, Megasphaera sp.
MKKRNREEYYVGLDIGTSSVGWAVATPDYRIPKFRGHKMWGSRLFAEGKRAAERRQFRTNRRRLARRRDRLQILEELFAEEMAKVDNTFFMRLKESKFFLEDKTVKEKHILFSTDKFDADRFYKDNPTIYHVRKRLMEEEPQDIRELFLAVHHILKYRGHFLFAGSLEQNGASIEELVRTLLGKQGLAILDDTIDSNEMVNILKNTGETKSDRKKDVQELWNPLKDKVKKAQAAEMAGLVLGLKSDISKLFANSDYKDLDSSIKNINFSSGDYEEKRDDYANSIGDDIVLLDTMKALYDTLILSQILQGKRSISAAKVEDYNTHKEQLRALKAILKPHKRLYNEMFRENNKKDLSNYVAYISSYSEGKRVNREGFYKYVQAVLKQVDDSDSKQAILEAIRLETFLPLLRVKDNAVIPHQIHQAELEAILETARKKYNFLNDVSDGVSVKDKIIQLFTFRIPYYVGPLNPHSGETVADRKQGTGWVVRKQRGKVYPWNFADMVDVKASAEAFITNLTNKCTYLIGEDVLPKRSLLYSEFMLLNELNMIKYDGHELPVAIKQLYIEQVFKQEHKKQTKGRVLDFLKRNGLITGSATAVITGMDDAIKGDLQSYRDMVRIFGAGFDHSMAERIIRWVTLFGEAKDILENKIREVYGNSISDSQMRAIKKLKYADWGRLSQAFLIAVKGCDKSGVERNIITCLRASSQNLMEILSDQGTYIKQIKAWNHQHTTNMMDTLDYQLVDDLYVAPSVKRSIWQSLCIVEELVKIMGQAPKKIFVEVTRTKQAEKTKKDSRKKRLVELYTAIGKEGAAWKKEIEAHQAGDFRRKKLYLYYTQMGRCMYSNEPIAMDALFTSAYDIDHIYPQSLTKDGSWDNLVLVKSQLNKEKSDQYPLRPAIREKNKAHWQYLCRAGFISEKKYERLMRTTELTAEELSGFIARQLVETSQATKAVTGLLERIYTNTEICFVKAETVSQFRHQHNFIKIRELNNYHHAKDAYLNIVVGNVYHEKFTKNPWEFIARSTERRPYNLNRMYDFDLLKQGRVIWQVPKSLETVQAMMKSNDVRITKKLLVQKGELYDATITKAHKAKEGTYFPLKGADARLRDVHRYGGYEKIKIAYYSVFSCREKASNTIHTLIIPIPVYKAGLLQTEADLTAYAWQTKQKTKPIKDIYSAITPIYKKLCINTVVKIDGFKYFLGGKTGDYMWLDPAIPVVLDEQAAAYLKAISKVGRADDVENTAQAIDLITAEANEAFYDVLLKKMEAKIFAKAYQTIVEKLASETARERFRELSIGAQCSCLLEILNLLANNKTTFTFFKDKMGVTMSRRKQPMDLTKLEECIVYETSITGLYEKAVSLL

SEQ ID NO: 229 - protein, 650 aa, Haemophilus pittmaniae
MENKNLHYILGLDLGIASVGWAVVEIDKEENPLCLIDVGVRTFERAEVPKTGESLALSRRLARSARRLTQRRVARLKKAKRLLKLENILLSTDERLPHQVWQLRVEGLDRKLKRQEWAAVLLHLIKHRGYLSQRKNESKSENKELGALLSGVASNHELLQQTTYRTPAELAVKKFEVEEGHIRNQQGAYTHTFSRLDLLAEMELLFSRQQHFGNPFASEKLLENLTALLMWQKPALSGEAILKMLGKCTFEDEYKAAKNTYTAERFVWITKLNNLRIQENGLERALNDNERLILIEQPYEKAKLTYAQVRSILNLSDEAIFKGLRYSGEDKKAIETKTTLMEMKAYHQIRKVLEGNNLKAEWTELKENSTLLDEIGTAFSLYKTDEDISTYLAGKLSQPVLNALLENLSFDKFIQLSLKALYKLLPLMQQGLRYDEACHEMYGDHYGKKTYGKKTEENHYFLPQIPADEIRNPVVLRTLTQARKVINGVVRLYGSPARIHIETGREVGKSYKDRRELEKRQEENRKQRENAIKEFKEYFPHFAGEPKAKDILKMRLYKQQNAKCLYSGKPIELHRLLEKGYVEVDHALPFSRTWDDSFNNKVLVLANENQNKGNLTPFEWLDGKHNSERWRAFKALVETSAFPYAKNNAS

SEQ ID NO: 230 - protein, 1062 aa, Ralstonia syzygii
MAEKQHRWGLDIGTNSIGWAVIALIEGRPAGLVATGSRIFSDGRNPKDGSSLAVERRGPRQMRRRRDRYLRRRDRFMQALINVGLMPGDAAARKALVTENPYVLRQRGLDQALTLPEFGRALFHLNQRRGFQSNRKTDRATAKESGKVKNAIAAFRAGMGNARTVGEALARRLEDGRPVRARMVGQGKDEHYELYIAREWIAQEFDALWASQQRFHAEVLADAARDRLRAILLFQRKLLPVPVGKCFLEPNQPRVAAALPSAQRFRLMQELNHLRVMTLADKRERPLSFQERNDLLAQLVARPKCGFDMLRKIVFGANKEAYRFTIESERRKELKGCDTAAKLAKVNALGTRWQALSLDEQDRLVCLLLDGENDAVLADALREHYGLTDAQIDTLLGLSFEDGHMRLGRSALLRVLDALESGRDEQGLPLSYDKAVVAAGYPAHTADLENGERDALPYYGELLWRYTQDAPTAKNDAERKFGKIANPTVHIGLNQLRKLVNALIQRYGKPAQIVVELARNLKAGLEEKERIKKQQTANLERNERIRQKLQDAGVPDNRENRLRMRLFEELGQGNGLGTPCIYSGRQISLQRLFSNDVQVDHILPFSKTLDDSFANKVLAQHDANRYKGNRGPFEAFGANRDGYAWDDIRARAAVLPRNKRNRFAETAMQDWLHNETDFLARQLTDTAYLSRVARQYLTAICSKDDVYVSPGRLTAMLRAKWGLNRVLDGVMEEQGRPAVKNRDDHRHHAIDAVVIGATDRAMLQQVATLAARAREQDAERLIGDMPTPWPNFLEDVRAAVARCVVSHKPDHGPEGGLHNDTAYGIVAGPFEDGRYRVRHRVSLFDLKPGDLSNVRCDAPLQAELEPIFEQDDARAREVALTALAERYRQRKVWLEELMSVLPIRPRGEDGKTLPDSAPYKAYKGDSNYCYELFINERGRWDGELISTFRANQAAYRRFRNDPARFRRYTAGGRPLLMRLCINDYIAVGTAAERTIFRVVKMSENKITLAEHFEGGTLKQRDADKDDPFKYLTKSPGALRDLGARRIFVDLIGRVLDPGIKGD

SEQ ID NO: 231 - protein, 1052 aa, Haemophilus parainfluenzae
MENKNLHYILGLDLGIASVGWAVVEIDEKENPLRLIDVGVRTFERAETQKGESLALSRRSARSARRLTQRRVARLKKAKRLLKSENILLSTDERLPHQVWQLRVEGLDRKLERQEWAAVLLHLIKHRGYLSQRKNESKSENKELGALLSGVASNHELLQQATYRTPAELAVKKFEVEEGHIRNQQGAYTHTFSRLDLLAEMELLFSRQQHFGNPFASEKLLENLTALLMWQKPALSGEDILKMLGKCTFEDEYKAAKNTYTAERFVWITKLNNLRIQENGLERALSDNERLMLIEQPYEKAKLTYAQVRSILNLSDDAIFKGVRYSGEDKKAIETKTTLMEMKAYHQIRKVLEGNNLKAEWVALKANPTLLDEIGTAFSLYKTDEDISAYLAGKLSQPVLNALLENLSFDKFIQLSLKALYKLLPLMQQGLRYDEACREIYGDHYGKKTEETHHFLPQIPADEIRNPVVLRTLTQARKVINGVVRLYGSPARIHIETGREVGKSYKDRHELKKRQEENRKQREKTISEIKTLFPNFSGEPKGKDILKMRLYYQQNAKCLYSGKPLELHRLFEQKYVEVDHALPLSRTWDDSFNNKVLVLANENQNKGNLTPFEWLDGKNNSERWRTFKALVETSAFPYAKKQRILSQKLDEKGFIERNLNDTRYVARFLCNFIADNMHLTGEGKRKVFASNGQITALLRRRWGLAKSREDNDRHHALDAVLVACSTVAMQQKITRFVRFKAGDVFTGERIDRETGEIIPLHFPTPWQFFKQEVEIRIFSDNPKLELENRLPDRPQANHEFVQPLFVSRMPTRKMTGQGHMETVKSAKRLNEGISMIKMPLTKLKLKDLELMVNREREKDLYDALKTRLEAFNDDPAKAFAEPFMKKGGAIVKSVRVEQVQKSGVLVRQGNGVADNASMVRVDVFTKDGKYFLVPIYTWQVAKGILPNKAVIQGKDEEDWEDIDDATFQFSLHPNDLISVKTKKDEFLGYFNGLNRHTGGINIRTHDLEKSKGKQGIFEGIGVKIALSFEKYQIDELGKNIRLCKPSKRQPVR

SEQ ID NO: 232 - protein, 1331 aa, Lactobacillus sanfranciscensis
MNKQPYNIGLDIGTSSVGWSATELDNRLLHIKGHNGIGVRLFKEGESAADRRGFRTTRRRLARRKWRLRLLNEIFATEIAKVDPSFFARLKQSNVSPKDPNKTMFENILFDDENLDDQKFHHDYKTIYHLRQAIINHPEQKFDIRLIYLAMHHIIKYRGHFLNQANVQDFKGGKIDLEKSFKALNDIFENQGRDLRLVTDKANQYVKVLSDNAKTRSDRKKELSKLLYVPIDKDTDKNSKKVTGEILKAILGNKAKFDVIFGIEVENPKEWVLTFNSDDFDDKIEGLSSQMTDEDSEILLILKELYFALNLSDILNNSVTDKNAKTLSEAMINRYDDHKNQLAMLKKVIDSSDKKHAKELKEAYSAYIDGENNKKISFEDLKKRIQKNLVDSELSQKINDLLDHDYFLPKQRSKENGAIPHQLQQQELDQIIESQKQYYPFLAELNPNEKRSRQAKYKLDELVAFRVPYYVGPMVEVTDSNQENNGKFAWMIRKEQGEITPWNFDEKVDRTETATKFITRMTTTDTYLIGEPVLPKNSLLYQKFVVLNELNNLKINQEIITPGQKQYLYEHVMKKNKRVTLKKIADALVIKGDYPYAPEVKGTTDQKNLNNGLTTYIDLAKIFGNELDDVDREADFEKIIEWSTIFEDQHIFALKLQELKWLTEKQRNQVVKLRYQGWGKLSKELLAGLVDDNGQRIIDLLWSDNQNFMQIVNQKSFKESIADHNGAHLEEKNLKDVINDLYTSPQNKKAIRQVILVVDDIINAVGYEPANIMMEFAREDSNDHRLTNSRSRQLENVYKDITNSWFDNDSVKDELEDKIKNKDKFTDRLYLYFTQGGKDLYTGEPLNIDDLSSYDIDHILPQSFILDNSLDNRVLTSQRNNRVSKEDQLPGELFGTKMHAFWKRLKAAHLISNKKYYNLTLTPNSISKFNNQGRFINRQLVETRQVIKLAAEILHNRYSEEKGTNIVTIKANLTHHMREKFNFYKNRNVNDYHHAFDAYLTAFVGNWLLQQYPKLKPYFVYGDFAKTEINNLKSFNMLYKFEQAHQLNEKDGKIAKDADALLGYMKNVYHFKKMLVTKKLETNHGALFKQTLYPSPAHDIKKRQLIKPKDNRPTDIYGGYTHEERKYMSLVKVIGKKDNEYRMANVPLLKINKNNDIKEILKSQFSNKKFEIVLPKVLKNQLFSENGALFVIGSKGYKYNANQLVLSDLDMKLLNDLSNNKSIDEVTINQLFKNIVDSTNKYMPLYEIKNLNEVVEKFNNLEFNDKKKTITDFLLATHANPTMSNLKNIGLPSYFGRFTSGNAGIKLSENANVIYQSPTGLFSRKVKISDF

SEQ ID NO: 233 - protein, 1473 aa, Flavobacterium branchiophilum
MAKILGLDLGTNSIGWAVVERENIDFSLIDKGVRIFSEGVKSEKGIESSRAAERTGYRSARKIKYRRKLRKYETLKVLSLNRMCPLSIEEVEEWKKSGFKDYPLNPEFLKWLSTDEESNVNPYFFRDRASKHKVSLFELGRAFYHIAQRRGFLSNRLDQSAEGILEEHCPKIEAIVEDLISIDEISTNITDYFFETGILDSNEKNGYAKDLDEGDKKLVSLYKSLLAILKKNESDFENCKSEIIERLNKKDVLGKVKGKIKDISQAMLDGNYKTLGQYFYSLYSKEKIRNQYTSREEHYLSEFITICKVQGIDQINEEEKINEKKFDGLAKDLYKAIFFQRPLKSQKGLIGKCSFEKSKSRCAISHPDFEEYRMWTYLNTIKIGTQSDKKLRFLTQDEKLKLVPKFYRKNDFNFDVLAKELIEKGSSFGFYKSSKKNDFFYWFNYKPTDTVAACQVAASLKNAIGEDWKTKSFKYQTINSNKEQVSRTVDYKDLWHLLTVATSDVYLYEFAIDKLGLDEKNAKAFSKTKLKKDFASLSLSAINKILPYLKEGLLYSHAVFVANIENIVDENIWKDEKQRDYIKTQISEIIENYTLEKSRFEIINGLLKEYKSENEDGKRVYYSKEAEQSFENDLKKKLVLFYKSNEIENKEQQETIFNELLPIFIQQLKDYEFIKIQRLDQKVLIFLKGKNETGQIFCTEEKGTAEEKEKKIKNRLKKLYHPSDIEKFKKKIIKDEFGNEKIVLGSPLTPSIKNPMAMRALHQLRKVLNALILEGQIDEKTIIHIEMARELNDANKRKGIQDYQNDNKKFREDAIKEIKKLYFEDCKKEVEPTEDDILRYQLWMEQNRSEIYEEGKNISICDIIGSNPAYDIEHTIPRSRSQDNSQMNKTLCSQRFNREVKKQSMPIELNNHLEILPRIAHWKEEADNLTREIEIISRSIKAAATKEIKDKKIRRRHYLTLKRDYLQGKYDRFIWEEPKVGFKNSQIPDTGIITKYAQAYLKSYFKKVESVKGGMVAEFRKIWGIQESFIDENGMKHYKVKDRSKHTHHTIDAITIACMTKEKYDVLAHAWTLEDQQNKKEARSIIEASKPWKTFKEDLLKIEEEILVSHYTPDNVKKQAKKIVRVRGKKQFVAEVERDVNGKAVPKKAASGKTIYKLDGEGKKLPRLQQGDTIRGSLHQDSIYGAIKNPLNTDEIKYVIRKDLESIKGSDVESIVDEVVKEKIKEAIANKVLLLSSNAQQKNKLVGTVWMNEEKRIAINKVRIYANSVKNPLHIKEHSLLSKSKHVHKQKVYGQNDENYAMAIYELDGKRDFELINIFNLAKLIKQGQGFYPLHKKKEIKGKIVFVPIEKRNKRDVVLKRGQQVVFYDKEVENPKDISEIVDFKGRIYIIEGLSIQRIVRPSGKVDEYGVIMLRYFKEARKADDIKQDNFKPDGVFKLGENKPTRKMNHNQFTAFVEGIDFKVLPSGKFEKI

SEQ ID NO: 234 - protein, 933 aa, Mycoplasma iowae
SVRDYSDGPGSEKSPTPYGLWRLNKEGKVEKIGENLWDVLVGKCTIYGNDDSIKDEKTKLRGGKNSPIAEVFNFINDLTNIYLFSSSKLKLNSKTKLSILDEFNISLKTSKPIKSFSEKKLVKHIISTTEFKDINFDDVYGYRIDTSKKPLFTKLENTITIAKWLLDNNVYNELNIYDQEDLIKINNIFVILQKSMDINKRAQLVSDEYKIDLPICLELVKKIKGVMQTHSFSYKAMLEYIPVGIKYNDLETGEDTSINASTYFVDKINNLNTKLLFNGRPRKYIPKNIFEDGIISPTSKRAFIQTINVLNKIIKVYSKDYDIDNIAIELPRDKNTAEERKKISSNQKKAGEEIAEVLKFAGLNVEEYTSKLNSKTKLKLKLLKEQNYKDIYDGQEIDVIDVIKNSNKYHEEHIIPYSLCFIDSRRNKVLTKFENNKQKGNKTPFQWLSSIGKYAEFKDRVEKLFVEQKISKAKKELLLFEQDPRTEMLGFIEKNLSDTRYASKLVFDTFRDFFKVNNPNVKIKVINGALTNYARYNLFATYKDGLLERKGIMKQREFYEHHGIDATILAFLGSNHKINQLLKLSHKFKKQDDNKIYDENTGELIEFTKDFLSDEARKKAMELSKQIFEIPCKFSRPIYRKSNVSFSNETLISMKWIDDKYTKGVKINKLSLVNKDLDLNEYFADYETNEMKNLICYQEDKTLYNKLKNIYDKYNNFVENSNIKPVKNPFINYMISNFSSDDSKIQNFKHIIFYDHKGNKKFVKSLKVCGDEKNLSNIVLRKDQKDIMNSKKIKKSGILESLNPISARIYKDNKGKYITIPINSLVLNWTKKGLEIDNEKLCNILKSKNIFNNQFIEINAGQSIINNENKLFYFVGGGDFKVNKLEIKSQFCDNEIFFPRKQMNISIATIIDNYKLCEVDELGKIYNIRKIVL

SEQ ID NO: 235 - protein, 1358 aa, Acidaminococcus intestini; identical to SEQ ID NO: 99

SEQ ID NO: 236 - protein, 983 aa, Campylobacter jejuni
MARILAFDIGISSIGWAFSENDELKDCGVRIFTKAENPKTGESLALPRRLARSARKRLARRKARLNHLKHLIANEFKLNYEDYQSFDESLAKAYKGSLISPYELRFRALNELLSKQDFARVILHIAKRRGYDDIKNSDDKEKGAILKAIKQNEEKLANYQSVGEYLYKEYFQKFKENSKEFTNVRNKKESYERCIAQSFLKDELKLIFKKQREFGFSFSKKFEEEVLSVAFYKRALKDFSHLVGNCSFFTDEKRAPKNSPLAFMFVALTRIINLLNNLKNTEGILYTKDDLNALLNEVLKNGTLTYKQTKKLLGLSDDYEFKGEKGTYFIEFKKYKEFIKALGEHNLSQDDLNEIAKDITLIKDEIKLKKALAKYDLNQNQIDSLSKLEFKDHLNISFKALKLVTPLMLEGKKYDEACNELNLKVAINEDKKDFLPAFNETYYKDEVTNPVVLRAIKEYRKVLNALLKKYGKVHKINIELAREVGKNHSQRAKIEKEQNENYKAKKDAELECEKLGLKINSKNILKLRLFKEQKEFCAYSGEKIKISDLQDEKMLEIDHIYPYSRSFDDSYMNKVLVFTKQNQEKLNQTPFEAFGNDSAKWQKIEVLAKNLPTKKQKRILDKNYKDKEQKNFKDRNLNDTRYIARLVLNYTKDYLDFLPLSDDENTKLNDTQKGSKVHVEAKSGMLTSALRHTWGFSAKDRNNHLHHAIDAVIIAYANNSIVKAFSDFKKEQESNSAELYAKKISELDYKNKRKFFEPFSGFRQKVLDKIDEIFVSKPERKKPSGALHEETFRKEEFYQSYGGKEGVLKALELGKIRKVNGKIVKNGDMFRVDIFKHKKTNKFYAVPIYTMDFALKVLPNKAVARSKKGEIKDWILMDENYEFCFSLYKDSLILIQTKDMQEPEFVYYNAFTSSTVSLIVSKHDNKFETLSKNQKILFKNANEKEVIAKSIGIQNLKVFEKYIVSALGEVTKAEFRQREDFKK

SEQ ID NO: 237 - protein, 1338 aa, Streptococcus macacae
MTKPYSIGLDIGTNSVGWAVVTDGYKVPAKKMKVLGNTDKSHIKKNLLGALLFDSGNTAKDRRLKRTARRRYTRRRNRILYLQEIFAEEMAKADESFFQRLNESFLTNDDKEFDSHPIFGNKAEEEAHHHKFPTIFHLRKHLADSTEKSDLRLIYLALAHMIKFRGHFLIEGQLKAENTNVQTLFDDFVEVYDKTVEESHLSEISVSSILTEKISKSRRLENLIKYYPTEKKNTLFGNLIALSLGLQPNFKTNFKLSEDAKLQFSKDTYEEDLGELLGKIGDNYADLFISAKNLYDAILLSGILTIDDNTTKAPLSASMIKRYEEHQEDLAQLKKFIRQNLPDQYSEVFSDKTKDGYAGYIDGKTNQEAFYKYIKNMLSKTEGADYFLDKIDREDFLRKQRTFDNGSVPHQIHLQEMHAILRRQGEYYPFLKENQDKIEKILTFRIPYYVGPLARKGSRFAWAEYKADKKVTPWNFDDILDKEKSAEEFITRMTLNDLYLPEEKVLPKHSLVYETFNVYNELTKVKYVNEQGKAIFFDANMKQEIFDHVFKENRKVTKDKLLNYLNKEFEEFRIVNLTGLDKENKAFNSSLGTYHDLRKILDKSFLDDKVNEKIIEDIIQTLTLFEDREMIRQRLQKYSDIFTTQQLKKLERRHYTGWGRLSAKLINGIRDKQSNKTILGYLIDDGYSNRNFMQLINDDSLPFKEEIARAQVIGETDDLNQLVSDIAGSPAIKKGILQSLKIVDELVKVMGHNPANIVIEMARENQTTAKGRRSSQQRYKRLEEAIKNLDHDLNHKILKEHPTDNQALQNDRLFLYYLQNGRDMYTEDPLDINRLSDYDIDHIIPQSFIKDDSIDNKVLVSSAKNRGKSDNVPSEDVVNRMRPFWNKLLSCGLISQRKYSNLTKKELKPDDKAGFIKRQLVETRQITKHVAQILDARFNTKRDENKKVIRDVKIITLKSNLVSQFRKDFKFYKVREINDYHHAHDAYLNAVIGKALLDVYPQLEPEFVYGEYPHFHGYKENKATAKKFFYSNIMNFFKKDDIRTDENGEIVWKKDEHISNIKRVLSYPQVNIVKKVEIQTVGQNGGLFDDNPKSPLEVTPSKLVPLKKELNPKKYGGYQKPTTAYPVLLITDTKQLIPISVMNKKQFEQNPVKFLRDRGYQQVGKNDFIKLPKYTLVDIGDGIKRLWASSKEIHKGNQLVVSKKSQILLYHAHHLDSDLSNDYLQNHNQQFDVLFNEIISFSKKCKLGKEHIQKIENVYSNKKNSASIEELAESFIKLLGFTQLGATSPFNFLGVKLNQKQYKGKKDYILPCTEGTLIRQSITGLYETRVDLSKIGED

SEQ ID NO: 238 - protein, 1265 aa, Mycoplasma ovipneumoniae
MHNKKNITIGFDLGIASIGWAIIDSTTSKILDWGTRTFEERKTANERRAFRSTRRNIRRKAYRNQRFINLILKYKDLFELKNISDIQRANKKDTENYEKIISFFTEIYKKCAAKHSNILEVKVKALDSKIEKLDLIWILHDYLENRGFFYDLEEENVADKYEGIEHPSILLYDFFKKNGFFKSNSSIPKDLGGYSFSNLQWVNEIKKLFEVQEINPEFSEKFLNLFTSVRDYAKGPGSEHSASEYGIFQKDEKGKVFKKYDNIWDKTIGKCSFFVEENRSPVNYPSYEIFNLLNQLINLSTDLKTTNKKIWQLSSNDRNELLDELLKVKEKAKIISISLKKNEIKKIILKDFGFEKSDIDDQDTIEGRKIIKEEPTTKLEVTKHLLATIYSHSSDSNWININNILEFLPYLDAICIILDREKSRGQDEVLKKLTEKNIFEVLKIDREKQLDFVKSIFSNTKFNFKKIGNFSLKAIREFLPKMFEQNKNSEYLKWKDEEIRRKWEEQKSKLGKTDKKTKYLNPRIFQDEIISPGTKNTFEQAVLVLNQIIKKYSKENIIDAIIIESPREKNDKKTIEEIKKRNKKGKGKTLEKLFQILNLENKGYKLSDLETKPAKLLDRLRFYHQQDGIDLYTLDKINIDQLINGSQKYEIEHIIPYSMSYDNSQANKILTEKAENLKKGKLIASEYIKRNGDEFYNKYYEKAKELFINKYKKNKKLDSYVDLDEDSAKNRFRFLTLQDYDEFQVEFLARNLNDTRYSTKLFYHALVEHFENNEFFTYIDENSSKHKVKISTIKGHVTKYFRAKPVQKNNGPNENLNNNKPEKIEKNRENNEHHAVDAAIVAIIGNKNPQIANLLTLADNKTDKKFLLHDENYKENIETGELVKIPKFEVDKLAKVEDLKKIIQEKYEEAKKHTAIKFSRKTRTILNGGLSDETLYGFKYDEKEDKYFKIIKKKLVTSKNEELKKYFENPFGKKADGKSEYTVLMAQSHLSEFNKLKEIFEKYNGFSNKTGNAFVEYMNDLALKEPTLKAEIESAKSVEKLLYYNFKPSDQFTYHDNINNKSFKRFYKNIRIIEYKSIPIKFKILSKHDGGKSFKDTLFSLYSLVYKVYENGKESYKSIPVTSQMRNFGIDEFDFLDENLYNKEKLDIYKSDFAKPIPVNCKPVFVLKKGSILKKKSLDIDDFKETKETEEGNYYFISTISKRFNRDTAYGLKPLKLSVVKPVAEPSTNPIFKEYIPIHLDELGNEYPVKIKEHTDDEKLMCTIK

SEQ ID NO: 239 - protein, 1535 aa, Flavobacterium columnare
MTKILGLDLGTNSIGWAIRDTENEGINQILDKGARIFSEGVKSENGKEISRAAERTAYRSARKIKYRRKLRKYETLKVLSINGMCPLSVEEVEQWKKSGFKEYPLNPEFLDWLRTNEDKNINPYLFRDKASKQKVTLFELGRALYHIAQRRGFLSNRLDQSAEGVFEEHNPQIQNLIEDLDSSNTILNELKEYYINLGIIDETEKSGFKKDLDEGEKKLKSLYNSLVAITKKNANDIETCKQELIARLNKKEDLGKVKGKIKDISQAMLDRNFKTLGQYFFSLYNKERIRNQYTSREEHYLEEFIIICQTQGIEGINTNEKLPEKKFTGLAKDLYRAIFFQRPLKSQKGLIGKCSFEKNKSRCAVSHPDYEEFRMWSYLNTIKIGTQSEKTLRFLTLEEKLKLVPKFYRKSDFNFEVLAKELVEKGASFGYYKSSKKNEFFYWFNYKPTDSVSACVVSASLENAIGKDWKIKTFEYQTRNTEKNEVTKSVDYKDLWHLLSVATSDTYLYDFAIEKLKLEPKNAKAFSKTKLKKDFASLSLAAIAKILPYLKQGLLYSHAVFMANIENIVDADIWKDEEQQKFIQSKIVELVDNYIVEKSKLELINGLLKIYNTEDKEGRKVYYSKEAESLFEADLRKKLVPFYKANIIIEEHEQEIIFQDLFPILMDQLKKQEFIKIGRLDKQIEAFLEGENEEGQIFCNHTDKLKKLYHPSDIEVFKKKTIKDEWGNEKVVLGSPLTTSIKNPMAMRALHQLRKVLNTLIANDQIDEDTRIHIEMARELNDANKRKGIQDFQNENKKFREEAIKEIKKLYLEECHKDVNPTEDDILRYQLWLEQGKCEIYEEGNNISICDIIGSNPSYDIEHTIPRSISQDNSQMNKTLCSLKFNRSIKKQKMPVELSNYNDILPRIAHWKKEAEELTRQIETISRSIKSAATKVAKDKNIRKRHYLTLKRDYILGKYERFTWEEPKVGFKNSQIPDTGIITKYAQAYLKSYFKRVESVKGGAVAEFRKLWGIQESFIDENWWKHYKDKDRDKHTHHTIDAITIACMPKDKYDLLAHAWRLEDEQDKKAAKVLIEQAKPWKTFKEDIEKIETEILVSHFTPDNVKKQSKSIIKNRGKKVYVLKNELPVNFKNKIEGKDYFKLKFDSKILYKIPKKKEKQTDTFYEELPKNYLNGVEGKDYFKINTTGKTFYKIPIFNQGDTIRGSLHQETTYGAIKLPDIDIETKKPLHTDKGGFILKKDIKGNEIVFFVVRKEISKISENDVQNIVDNVVRKKIENAIANSLITFKIVKKKKVAVIKEGVTIWMREPNIEKGIEGIPIKKVRIITNSVKNPIEIKVHSPLSKSRHKHKQKVYGQNDENYAMALYELDGKREFELINNFNLAKLLKQSQSYYPLHKEKEIKGKKILVPIEKRNNKDVILKRGQQVVFYDKTVENPKDISEIIDFRERIYIIEGLTIQRQKDKKTSKVNEYGIIQLRHFKEARKSEEISKDNFKPDGEFKINENKPTRKMNHNQFTAFVEGIDFKVLPSGKFQKI

SEQ ID NO: 240 - protein, 1459 aa, Flavobacterium columnare
MKFNLGLDIGTNSIGWALVNEDYENKKGKIIAAGSRIIPMTQDILDKFGSGAITETQTALRTDYRSKRKLIQRFLLRRERLHRVLNVLDFLPKHYAESIDFEKYFGKFLPNTEPKLAYNQNQFIFQNSFLEMLKEFQEKHPELLTNNKKIPYDWTIYYLRKKALNQRIEKEELAWLLLQFNQKRGYNQLRDEEEESVPNKQVEFYSLKIIDVVADQPKEGRDKRWYSINLENGWTYRRESKTPLFNWEGKTKDFIVTTDLNQDGSIKKDKEGKEKRSFRAPSEGDWTLLKKKTEKEIYESGKTLGTYIYDALLNTPDLKIKGDFIRTIDRSIYKEELQQIINKQKEYHLELNSSKLYKACLEELYPKNEIYKSALKNKDIAYLFINDILYYQRPLKAPKYNIGKCTYESRTFKKEDKKIREYIPAVAKSHPLFQEFRLWQWIKNLKIYEKLSSDNCTDFFLTNEQDFENLFEFLWNKKEIDHKGILEYLVKTKFPDLKPKQVKTKVKEYRWNYVYDHEKDESKTYPCGETYFLLKNKLDKIYNAQDDFLDKERLYNLWHIIYSVTDKKQYEKALAKFALKNHLDTKSFVNTFKRIPPFKNDYAIYSLKAIKKLLPLMRVGKYWNYDDIDPITKQKIQCIITGEENDTISTLVREKTNHFSNENDFKNLPLWLAGYIVYNSHNESSEIEKWKSPQDIDTFLKKFKQHALRNPIVEQVVTETLRVVRDIWSKKGQGKKDFFNEIHIELGKDLKNPVDKRRKLSSTNTKNESTNTRIKALLIELFTQGVENVKPNSPKHQEILKIFEEGALNSGIEIEEDIIKISNTDQPTKKQLELYILWLEHKYKSPYTGQSIPLSKLFTPNYEIEHIIPRSKYYDDNLSNKVICETEINRLKNNQLGYEFINNHEIREVTLEEGKTIRLLSPEQYWNFVTTYYAKNKAKRENLLLKELPVQMVEKQLNDTRYVSKYVMQLLSKIVRKEDGTDNGINSTNILSISGKMTRALKNDWDLNDVWNDLLLYRFERLNTITKTNLFTTYSEQKQKRMPIVPDQYAKGFHKKRLDHRHHALDAIVIACITRNHINYMNNQNIQGEKLKKNAIEKENYREILQKSRLDIRAQLCEKKYNDNDPTKYNWVFIKPWADFTENTKDILESIIPSFKQNLRIINKTVNYYEKYNENGKKVKVRQIKGDNWAIRKPLHKETISGKVHLSYKTPAKGKILTATRKVLDSSMDFKSIEKITDTGIQKILKNYLEYKKSPELAFSPEGIEELNATITKYNNGFHHKPIYKVRIYEEGVKFPLGNKGNKKSKYVEAEKGTNLFFAIYKDQENNRYFETIPFNDVLETLKKGMSAVPEKNQEENTLVFALSPQDLVFVPTLDEIENPDIVDFKNLTKDQTNRIYKMVSSSGKQCFFIKAEVATSIVNKMEFSTSNKMENSIEGIQIKSNCWKLKLDRLGTITRVIK

SEQ ID NO: 241 - protein, 1389 aa, Oenococcus kitaharae
MARDYSVGLDIGTSSVGWAAIDNKYHLIRAKSKNLIGVRLFDSAVTAEKRRGYRTTRRRLSRRHWRLRLLNDIFAGPLTDFGDENFLARLKYSWVHPQDQSNQAHFAAGLLFDSKEQDKDFYRKYPTIYHLRLALMNDDQKHDLREVYLAIHHLVKYRGHFLIEGDVKADSAFDVHTFADAIQRYAESNNSDENLLGKIDEKKLSAALTDKHGSKSQRAETAETAFDILDLQSKKQIQAILKSVVGNQANLMAIFGLDSSAISKDEQKNYKFSFDDADIDEKIADSEALLSDTEFEFLCDLKAAFDGLTLKMLLGDDKTVSAAMVRRFNEHQKDWEYIKSHIRNAKNAGNGLYEKSKKFDGINAAYLALQSDNEDDRKKAKKIFQDEISSADIPDDVKADFLKKIDDDQFLPIQRTKNNGTIPHQLHRNELEQIIEKQGIYYPFLKDTYQENSHELNKITALINFRVPYYVGPLVEEEQKIADDGKNIPDPTNHWMVRKSNDTITPWNLSQVVDLDKSGRRFIERLTGTDTYLIGEPTLPKNSLLYQKFDVLQELNNIRVSGRRLDIRAKQDAFEHLFKVQKTVSATNLKDFLVQAGYISEDTQIEGLADVNGKNFNNALTTYNYLVSVLGREFVENPSNEELLEEITELQTVFEDKKVLRRQLDQLDGLSDHNREKLSRKHYTGWGRISKKLLTTKIVQNADKIDNQTFDVPRMNQSIIDTLYNTKMNLMEIINNAEDDFGVRAWIDKQNTTDGDEQDVYSLIDELAGPKEIKRGIVQSFRILDDITKAVGYAPKRVYLEFARKTQESHLTNSRKNQLSTLLKNAGLSELVTQVSQYDAAALQNDRLYLYFLQQGKDMYSGEKLNLDNLSNYDIDHIIPQAYTKDNSLDNRVLVSNITNRRKSDSSNYLPALIDKMRPFWSVLSKQGLLSKHKFANLTRTRDFDDMEKERFIARSLVETRQIIKNVASLIDSHFGGETKAVAIRSSLTADMRRYVDIPKNRDINDYHHAFDALLFSTVGQYTENSGLMKKGQLSDSAGNQYNRYIKEWIHAARLNAQSQRVNPFGFVVGSMRNAAPGKLNPETGEITPEENADWSIADLDYLHKVMNFRKITVTRRLKDQKGQLYDESRYPSVLHDAKSKASINFDKHKPVDLYGGFSSAKPAYAALIKFKNKFRLVNVLRQWTYSDKNSEDYILEQIRGKYPKAEMVLSHIPYGQLVKKDGALVTISSATELHNFEQLWLPLADYKLINTLLKTKEDNLVDILHNRLDLPEMTIESAFYKAFDSILSFAFNRYALHQNALVKLQAHRDDFNALNYEDKQQTLERILDALHASPASSDLKKINLSSGFGRLFSPSHFTLADTDEFIFQSVTGLFSTQKTVAQLYQETK

SEQ ID NO: 242 - protein, 1425 aa, Prevotella micans
MIQKIFGLDLGTNSIGSSVRNLELGENLTEQLEFFSSDIFGSSVSKNSNGREYSLAGNRSAHRRSRGLNEARRRKLWATLDLLIEHGLCPMSPDSLMQWRTYDKQKGLYRQYPIEDKDFNAWIMLDFNGDGKPDYSSPYQLRRELVVRQFDFDQPIERYKLGRALYHIAQHRGFKSSKGETIADQEKNEKKPIAEEGADIANEMKASETKLSKGLVAYMQENHLKTVGEAFAKLEDERVRIRNNESYRAIRSQYQDEIKEIFTYQKKLSVESELYERLTSEKKGVGTIFYKRPLRSQRGNVGKCTLERNKPRCPIGRPEFEEFRAWTLINNIKIRETAGEPYKQLPIKLRQELLKDCFLSKVKADFKFEDIRKYIEKRLGLSFSNDDKTINYKDSVSIAACPVTVRMKKLLGENWANCRIDGEKRRQAHGKNNNNEHIVSYTEEDIWHVCYNAEDPEEVSNFARKALHWDENKIKELVRLWTSIPQGYAMLSLKAIRNINRMLLLGLKYSDAVLLAKLPDIVPVSDEDILAITKEFLQLEDKLNQEKQINNIVNSLIANYKSKLEENRFADHNYQYQLGEGDDEDINTQIKSHIGAKLWVQIGADEQTKIFQAVRSKYQDFFKSYKRKFVESPKLGELLVAFLTEKFPNVKSKQWERLYHPSQIAIYRPIPVDNDRSKLRLGNPNIGAIKNPTVMRVLNTLRRRVNQLLDDGVISPDETRVVVETARELNDANTKWALDRYNRIRRDENEKIRKILKELNPTTNSISEQDIDKARYIFEQCETDFYTDGKVPYYNKDIKKYKLWLEQGGQCLYTGQTINLTNLFNPNAFDMEHTIPKSISFDNSDQNLTLCESYYNRFIKKNNIPTDMPNYDKDVTINGKEYTAIKPRLQRWKERVDRLSRNVDFWKGQARRAQDKDRKDECIREKHLWDMELAYWKGKLERFTMTDVTDGFKNSQLVDTRVITRHAVLYLKSIFNHVEVQRGETTAEFRKILGLQSIDEKKDRSLHSHHAIDATMLTVIPSAAKRDRMLELFYKIEETKKALKNYNDNNKTGLNLELKGLEEKLDKEKKDCRVGRRVNDLDRFINENIIVSHHTKDQALTPAHRRLRKRGKIVGGKEHPRWQTGDSLRGEIHKASYYGAITQFAKDANGKVLMKDGQAQIDPTIYYVIRRELKYKRSTQDSGFTNWEDLEKVIVDTDLFGLMKGQFPEGTSFKDACEQGFYMIKKGKNGEGDVKTHRIRHVRCKAVKTALRIKEQTYKSSKDYKQFFYAAVGDLYVMCYYTDGKKRDFKIYSLYDISNHRKSGTEDIPKFITDKKGNHLPLDYKLRTGDMVLLYKDNPEELKDLDQVNLKRRLYKVNRFESEGLIILLTHHLSTTTERGCSIGKIENYQNLPTAIRCGIKTIKFLIMGKHRDFVIRNGNIEFKH

SEQ ID NO: 243 - protein, 1473 aa, Mucilaginibacter paludis
MKNILGLDLGTNSIGWALIEKDTDQKNGNILGTGSRIIPMSQDIKDEFGKGNSISQTADRTKFRSVRRLRERHLLRRERLHRVLNVLGFLPKHYADQIDFKKRLGKLVNETEPKLVYDNKNFIFKKSFEAMLSDFNQHQPLLLADGKKVPFDWTIYYLRKKALTEKIEKEELAWLILNFNQKRGYYQLRGEEEEENPNKMVAFHSLKIVEVIADESQKGKAETWYSLILENGWIYRRSSKTPLYDWKGKQRDFIVTTDLNDDGSIKTDKEGLEKRSFRAPVEDDWTLVKKKTEQEINRSHKTVGTYIYENLLQDPKQKIKGKLVRTIEREFYKDELKMILKNQQKFHPELNDEHLYINCVRELYRNNQAHQTILSKKDFVHLFIDDIIFYQRPLRSQKSSISNCTLEFRKYKNENGTDQTDYLKAIPKSHPLFQEFRLWQWIYNLGIYQKEDDTNVTDELIKNIDGYQDLFDFLNNKKEIRQDILIKFLVEQTGLKGKPLSSVVAKYRWNFVEDKIYPCNETGTQIRTRLAKVENTPEDFLTAETEIKLWHIIYSVNDKADYEKALKTFAEKHNLDTHSFVENFKKFPPFKSEYGSFSEKAIKKLLPLIRLGKYWSWENIDKKTQERIEKILTGEFDEAIKSRVRDKAIHLTEEDHFQGLQLWLASYVVYGRHSEADNLDKWHTVADLEDYLAEFRQHSLRNPIVEQVITETLRVVKDIWLQYGQGAKDFFSEIHIELAREMKNTGDERKRLTSLVTDNENTNLRIKVLLSELLNDGNVENVRPYSPMQQEALKIFEDGVLNSDIEIEDDILKISKMAQPTNTELKRYKLWLEQKYRSPYTGQIIPLNRLFTADYEIEHIIPQSRFFDDSFSNKIICESAVNQLKDKQLGLEFIKNHSGTIVKLGMGKTAKILDVESYNEFVKGNYTKNISKRNKLMLEEIPDKMIERQLNDTRYISKFIISALSNIVRSESNDDGFNSKNVLPGNGKITSRLKQDWGMNDIWNELILPRFERMNKITDSAVFTAWNENNQKFLPIVPLEFSKGFQKKRIDHRHHALDALVIAASTREHINLLNNEHAKSDKRFDLNRKLRKFEKVAYNDPKTGKRIEKEVPTIFLKPWETFTVDAKNSLESIIVSFKQNLRVINRATNYSESYNDENGALRLGKDGNPLKEKIKQSKGDSWAIRKPMHKDFVYGKVHLQNVKLPKDKFITAIRKSLDVTFDLKRIETITDTGIQKILKNYLHSKENKVELAFSPEGIEDMNQHIERYNDGKKHQPIHKVRVFEIGSRFSLGESGNKKTKFVEAAKGTNLFFAVYQDDNKGKRNYETIPLNIVIERQKLGLHSVPTEDAKGGKLLFHLSPNDMVYVPTSEELEDNLASVNIKRLNTAQRKRIYKVEKASGVECYFIRQDIAYLIKNYDAKTKIGELESQNKLQTTMTDDRLKITDVCVKLNIDRLGSIAETFLGNQYGASKKT

SEQ ID NO: 244 - protein, 1365 aa, Filifactor alocis
MTKEYYLGLDVGTNSVGWAVTDSQYNLCKFKKKDMWGIRLFESANTAKDRRLQRGNRRRLERKKQRIDLLQEIFSPEICKIDPTFFIRLNESRLHLEDKSNDFKYPLFIEKDYSDIEYYKEFPTIFHLRKHLIESEEKQDIRLIYLALHNIIKTRGHFLIDGDLQSAKQLRPILDTFLLSLQEEQNLSVSLSENQKDEYEEILKNRSIAKSEKVKKLKNLFEISDELEKEEKKAQSAVIENFCKFIVGNKGDVCKFLRVSKEELEIDSFSFSEGKYEDDIVKNLEEKVPEKVYLFEQMKAMYDWNILVDILETEEYISFAKVKQYEKHKTNLRLLRDIILKYCTKDEYNRMFNDEKEAGSYTAYVGKLKKNNKKYWIEKKRNPEEFYKSLGKLLDKIEPLKEDLEVLTMMIEECKNHTLLPIQKNKDNGVIPHQVHEVELKKILENAKKYYSFLTETDKDGYSVVQKIESIFRFRIPYYVGPLSTRHQEKGSNVWMVRKPGREDRIYPWNMEEIIDFEKSNENFITRMTNKCTYLIGEDVLPKHSLLYSKYMVLNELNNVKVRGKKLPTSLKQKVFEDLFENKSKVTGKNLLEYLQIQDKDIQIDDLSGFDKDFKTSLKSYLDFKKQIFGEEIEKESIQNMIEDIIKWITIYGNDKEMLKRVIRANYSNQLTEEQMKKITGFQYSGWGNFSKMFLKGISGSDVSTGETFDIITAMWETDNNLMQILSKKFTFMDNVEDFNSGKVGKIDKITYDSTVKEMFLSPENKRAVWQTIQVAEEIKKVMGCEPKKIFIEMARGGEKVKKRTKSRKAQLLELYAACEEDCRELIKEIEDRDERDFNSMKLFLYYTQFGKCMYSGDDIDINELIRGNSKWDRDHIYPQSKIKDDSIDNLVLVNKTYNAKKSNELLSEDIQKKMHSFWLSLLNKKLITKSKYDRLTRKGDFTDEELSGFIARQLVETRQSTKAIADIFKQIYSSEVVYVKSSLVSDFRKKPLNYLKSRRVNDYHHAKDAYLNIVVGNVYNKKFTSNPIQWMKKNRDTNYSLNKVFEHDVVINGEVIWEKCTYHEDTNTYDGGTLDRIRKIVERDNILYTEYAYCEKGELFNATIQNKNGNSTVSLKKGLDVKKYGGYFSANTSYFSLIEFEDKKGDRARHIIGVPIYIANMLEHSPSAFLEYCEQKGYQNVRILVEKIKKNSLLIINGYPLRIRGENEVDTSFKRAIQLKLDQKNYELVRNIEKFLEKYVEKKGNYPIDENRDHITHEKMNQLYEVLLSKMKKFNKKGMADPSDRIEKSKPKFIKLEDLIDKINVINKMLNLLRCDNDTKADLSLIELPKNAGSFVVKKNTIGKSKIILVNQSVTGLYENRREL

SEQ ID NO: 245 - protein, 1130 aa, Streptococcus macedonicus
MTNGKILGLDIGIASVGVGIIEAKTGKVVHANSRLFSAANAENNAERRGFRGSRRLNRRKKHRVKRVRDLFEKYGIVTDFRNLNLNPYELRVKGLTEQLTNEELFAALRTISKRRGISYLDDAEDDSTGSTDYAKSIDENRRLLKTKTPGQIQLERLEKYGQLRGNFTVYDENGEAHRLINVFSTSDYEKEARKILETQADYNKKITAEFIDDYVEILTQKRKYYHGPGNEKSRTDYGRFRTDGTTLENIFGILIGKCNFYPDEYRASKASYTAQEYNFLNDLNNLKVPTETGKLSTEQKESLVEFAKNTAILGPAKLLKEIAKILDCKVDEIKGYREDDKGKPDLHTFEPYRKLKFNLDSVNIDYLSREVLDKLADILTLNTEREGIEDAIKRNLPNQFTEEQISEIINVRKSQSTAFNKGWHSFSAKLMNELIPELYATSDEQMTILTRLEKFKVKKKSSKNIKTIDEKEITDEIYNPVVAKSVRQTIKIINAAVKKYGDFDKIVIEMPRDKNADDEKKFINKRNKENKKEKDDALKRAAYLYNGTDKLPDEVFHGNKQLETKIRLWYQQGERCLYSGKPIPIQELVHNSNNFEIDHILPLSLSFDDSLANKVLVYSWTNQEKGQKTPYQVIDSMDAAWSFREMKEYVLKQKGLGKKKRDYLLTTENIDKIEVKKKFIERNLVDTRYASRVVLNSLQSALRELGKDTKVSVVRGQFTSQLRRKWKIDKSRETYHHHAVDALIIAASSQLKLWEKQDNPMFVDYGNNQVVDKQTGEILSVSDNEYKELVFQPPYQGFVNTISSKGFEDEILFSYQVDSKYNRKVSDATIYSTRKAKIGKDKKEETYVLGKIKDIYSQNGFDTFVKKYNKDKTQFLMYQKDPLTWENVIEVILGDYPTTKKSEDGKNDVKCNPFEEYRRENGLICKYSKKGKGTPIKSLKYYDKKLGNCIDITPEESRNKVILQSINPWRADVYFNPETLKYELMGLKYSDLSFEKGTGNYHISQEKYDAIKEKEGIGKKSEFKFTLYRNDLILIKDIASGEQEIYRFLSRTMPNVNHYVELKPYDKEKFDNVQELVEALGEADKVGRCIKSLNKPNISIYKVRTDVLGNKYFVKKEGDKPKLDFKNNKK

SEQ ID NO: 246 - protein, 1367 aa, Streptococcus pyogenes
MDKKYSIGLDIGTNSVGWAVITDDYKVPSKKFKVLGNTDRHSIKKNLIGALLFGSGETAEATRLKRTARRRYTRRKNRICYLQEIFSNEMAKVDDSFFHRLEESFLVEEDKKHERHPIFGNIVDEVAYHEKYPTIYHLRKKLADSTDKADLRLIYLALAHMIKFRGHFLIEGDLNPDNSDVDKLFIQLVQIYNQLFEENPINASRVDAKAILSARLSKSRRLENLIAQLPGEKRNGLFGNLIALSLGLTPNFKSNFDLAEDAKLQLSKDTYDDDLDNLLAQIGDQYADLFLAAKNLSDAILLSDILRVNSEITKAPLSASMIKRYDEHHQDLTLLKALVRQQLPEKYKEIFFDQSKNGYAGYIDGGASQEEFYKFIKPILEKMDGTEELLVKLNREDLLRKQRTFDNGSIPHQIHLGELHAILRRQEDFYPFLKDNREKIEKILTFRIPYYVGPLARGNSRFAWMTRKSEETITPWNFEEVVDKGASAQSFIERMTNFDKNLPNEKVLPKHSLLYEYFTVYNELTKVKYVTEGMRKPAFLSGEQKKAIVDLLFKTNRKVTVKQLKEDYFKKIECFDSVEISGVEDRFNASLGAYHDLLKIIKDKDFLDNEENEDILEDIVLTLTLFEDRGMIEERLKTYAHLFDDKVMKQLKRRRYTGWGRLSRKLINGIRDKQSGKTILDFLKSDGFANRNFMQLIHDDSLTFKEDIQKAQVSGQGHSLHEQIANLAGSPAIKKGILQTVKIVDELVKVMGHKPENIVIEMARENQTTQKGQKNSRERMKRIEEGIKELGSQILKEHPVENTQLQNEKLYLYYLQNGRDMYVDQELDINRLSDYDVDHIVPQSFIKDDSIDNKVLTRSDKNRGKSDNVPSEEVVKKMKNYWRQLLNAKLITQRKFDNLTKAERGGLSELDKAGFIKRQLVETRQITKHVAQILDSRMNTKYDENDKLIREVKVITLKSKLVSDFRKDFQFYKVREINNYHHAHDAYLNAVVGTALIKKYPKLESEFVYGDYKVYDVRKMIAKSEQEIGKATAKYFFYSNIMNFFKTEITLANGEIRKRPLIETNGETGEIVWDKGRDFATVRKVLSMPQVNIVKKTEVQTGGFSKESILPKRNSDKLIARKKDWDPKKYGGFDSPTVAYSVLVVAKVEKGKSKKLKSVKELLGITIMERSSFEKNPIDFLEAKGYKEVKKDLIIKLPKYSLFELENGRKRMLASAGELQKGNELALPSKYVNFLYLASHYEKLKGSPEDNEQKQLFVEQHKHYLDEIIEQISEFSKRVILADANLDKVLSAYNKHRDKPIREQAENIIHLFTLTNLGAPAAFKYFDTTIDRKRYTSTKEVLDATLIHQSITGLYETRIDLSQLGGD

SEQ ID NO: 247 - protein, 1233 aa, Mycoplasma canis
MEKKRKVTLGFDLGIASVGWAIVDSETNQVYKLGSRLFDAPDTNLERRTQRGTRRLLRRRKYRNQKFYNLVKRTEVFGLSSREAIENRFRELSIKYPNIIELKTKALSQEVCPDEIAWILHDYLKNRGYFYDEKETKEDFDQQTVESMPSYKLNEFYKKYGYFKGALSQPTESEMKDNKDLKEAFFFDFSNKEWLKEINYFFNVQKNILSETFIEEFKKIFSFTRDISKGPGSDNMPSPYGIFGEFGDNGQGGRYEHIWDKNIGKCSIFTNEQRAPKYLPSALIFNFLNELANIRLYSTDKKNIQPLWKLSSVDKLNILLNLFNLPISEKKKKLTSTNINDIVKKESIKSIMISVEDIDMIKDEWAGKEPNVYGVGLSGLNIEESAKENKFKFQDLKILNVLINLLDNVGIKFEFKDRNDIIKNLELLDNLYLFLIYQKESNNKDSSIDLFIAKNESLNIENLKLKLKEFLLGAGNEFENHNSKTHSLSKKAIDEILPKLLDNNEGWNLEAIKNYDEEIKSQIEDNSSLMAKQDKKYLNDNFLKDAILPPNVKVTFQQAILIFNKIIQKFSKDFEIDKVVIELAREMTQDQENDALKGIAKAQKSKKSLVEERLEANNIDKSVFNDKYEKLIYKIFLWISQDFKDPYTGAQISVNEIVNNKVEIDHIIPYSLCFDDSSANKVLVHKQSNQEKSNSLPYEYIKQGHSGWNWDEFTKYVKRVFVNNVDSILSKKERLKKSENLLTASYDGYDKLGFLARNLNDTRYATILFRDQLNNYAEHHLIDNKKMFKVIAMNGAVTSFIRKNMSYDNKLRLKDRSDFSHHAYDAAIIALFSNKTKTLYNLIDPSLNGIISKRSEGYWVIEDRYTGEIKELKKEDWTSIKNNVQARKIAKEIEEYLIDLDDEVFFSRKTKRKTNRQLYNETIYGIATKTDEDGITNYYKKEKFSILDDKDIYLRLLREREKFVINQSNPEVIDQIIEIIESYGKENNIPSRDEAINIKYTKNKINYNLYLKQYMRSLTKSLDQFSEEFINQMIANKTFVLYNPTKNTTRKIKFLRLVNDVKINDIRKNQVINKFNGKNNEPKAFYENINSLGAIVFKNSANNFKTLSINTQIAIFGDKNWDIEDFKTYNMEKIEKYKEIYGIDKTYNFHSFIFPGTILLDKQNKEFYYISSIQTVRDIIEIKFLNKIEFKDENKNQDTSKTPKRLMFGIKSIMNNYEQVDISPFGINKKIFE

SEQ ID NO: 248 - protein, 1375 aa, Lactobacillus johnsonii
MTKIKDDYIVGLDIGTDSCGWVAMNSNNDILKLQGKTAIGSRLFEGGKSAAERRLFRTTHRRIKRRRWRLKLLEEFFDPYMAEVDPYFFARLKESGLSPLDKRKTVSSIVFPTSAEDKKFYDDYPTIYHLRYKLMTEDEKFDLREVYLAIHHIIKYRGNFLYNTSVKDFKASKIDVKSSIEKLNELYENLGLDLNVEFNISNTAEIEKVLKDKQIFKRDKVKKIAELFAIKTDNKEQSKRIKDISKQVANAVLGYKTRFDTIALKEISKDELSDWNFKLSDIDADSKFEALMGNLDENEQAILLTIKELFNEVTLNGIVEDGNTLSESMINKYNDHRDDLKLLKEVIENHIDRKKAKELALAYDLYVNNRHGQLLQAKKKLGKIKPRSKEDFYKVVNKNLDDSRASKEIKKKIELDSFMPKQRTNANGVIPYQLQQLELDKIIENQSKYYPFLKEINPVSSHLKEAPYKLDELIRFRVPYYVGPLISPNESTKDIQTKKNQNFAWMIRKEEGRITPWNFDQKVDRIESANKFIKRMTTKDTYLFGEDVLPANSLLYQKFTVLNELNNIRINGKRISVDLKQEIYENLFKKHTTVTVKKLENYLKENHNLVKVEIKGLADEKKFNSGLTTYNRFKNLNIFDNQIDDLKYRNDFEKIIEWSTIFEDKSIYKEKLRSIDWLNEKQINALSNIRLQGWGRLSKKLLAQLHDHNGQTIIEQLWDSQNNFMQIVTQADFKDAIAKANQNLLVATSVEDILNNAYTSPANKKAIRQVIKVVDDIVKAASGKVPKQIAIEFTRDADENPKRSQTRGSKLQKVYKDLSTELASKTIAEELNEAIKDKKLVQDKYYLYFMQLGRDAYTGEPINIDEIQKYDIDHILPQSFIKDDALDNRVLVSRAVNNGKSDNVPVKLFGNEMAANLGMTIRKMWEEWKNIGLISKTKYNNLLTDPDHINKYKSAGFIRRQLVETSQIIKLVSTILQSRYPNTEIITVKAKYNHYLREKFDLYKSREVNDYHHAIDAYLSAICGNLLYQNYPNLRPFFVYGQYKKFSSDPDKEKAIFNKTRKFSFISQLLKNKSENSKEIAKKLKRAYQFKYMLVSRETETRDQEMFKMTVYPRFSHDTVKAPRNLIPKKMGMSPDIYGGYTNNSDAYMVIVRIDKKKGTEYKILGIPTRELVNLKKAEKEDHYKSYLKEILTPRILYNKNGKRDKKITSFEIVKSKIPYKQVIQDGDKKFMLGSSTYVYNAKQLTLSTESMKAITNNFDKDSDENDALIKAYDEILDKVDKYLPLFDINKFREKLHSGREKFIKLSLEDKKDTILKVLEGLHDNAVMTKIPTIGLSTPLGFMQFPNGVILSENAKLIYQSPTGLFKKSVKISDL

SEQ ID NO: 249 - protein, 1053 aa, Staphylococcus aureus
MKRNYILGLDIGITSVGYGIIDYETRDVIDAGVRLFKEANVENNEGRRSKRGARRLKRRRRHRIQRVKKLLFDYNLLTDHSELSGINPYEARVKGLSQKLSEEEFSAALLHLAKRRGVHNVNEVEEDTGNELSTKEQISRNSKALEEKYVAELQLERLKKDGEVRGSINRFKTSDYVKEAKQLLKVQKAYHQLDQSFIDTYIDLLETRRTYYEGPGEGSPFGWKDIKEWYEMLMGHCTYFPEELRSVKYAYNADLYNALNDLNNLVITRDENEKLEYYEKFQIIENVFKQKKKPTLKQIAKEILVNEEDIKGYRVTSTGKPEFTNLKVYHDIKDITARKEIIENAELLDQIAKILTIYQSSEDIQEELTNLNSELTQEEIEQISNLKGYTGTHNLSLKAINLILDELWHTNDNQIAIFNRLKLVPKKVDLSQQKEIPTTLVDDFILSPVVKRSFIQSIKVINAIIKKYGLPNDIIIELAREKNSKDAQKMINEMQKRNRQTNERIEEIIRTTGKENAKYLIEKIKLHDMQEGKCLYSLEAIPLEDLLNNPFNYEVDHIIPRSVSFDNSFNNKVLVKQEENSKKGNRTPFQYLSSSDSKISYETFKKHILNLAKGKGRISKTKKEYLLEERDINRFSVQKDFINRNLVDTRYATRGLMNLLRSYFRVNNLDVKVKSINGGFTSFLRRKWKFKKERNKGYKHHAEDALIIANADFIFKEWKKLDKAKKVMENQMFEEKQAESMPEIETEQEYKEIFITPHQIKHIKDFKDYKYSHRVDKKPNRELINDTLYSTRKDDKGNTLIVNNLNGLYDKDNDKLKKLINKSPEKLLMYHHDPQTYQKLKLIMEQYGDEKNPLYKYYEETGNYLTKYSKKDNGPVIKKIKYYGNKLNAHLDITDDYPNSRNKVVKLSLKPYRFDVYLDNGVYKFVTVKNLDVIKKENYYEVNSKCYEEAKKLKKISNQAEFIASFYNNDLIKINGELYRVIGVNNDLLNRIEVNMIDITYREYLENMNDKRPPRIIKTIASKTQSIKKYSTDILGNLYEVKSKKHPQIIKKG

SEQ ID NO: 250 - protein, 1063 aa, Simonsiella muelleri
MEKFHYVLGLDLGIASVGWAAIEIDKETETSIGLLDCGVRTFERAEVPKTGDSLAKARREARSTRRLIRRRSHRLLRLKRLLKREIFRQPETFKDLPINAWQLRVKGLDSRLNEYEWAAVLLHLVKHRGYLSQRKSEMSETDSKSEMGRLLAGVAENHQLLQQEQYRTPAELALKKFVKHFRNKGGDYAHTFNRLDLQAELHLLFQKQRELGNPFTSPELERQVDDLLMTQRSALQGDAILKMLGHCGFEPEQFKAAKNTFSAERFIWLTKLNNLRIQDQGKERALTADERTKLLDEPYKKSKLTYAQVRKLLSLPQTAIFKGLRYDLEHDKKAENSTLMEMKSYHNIRQTLEKSGLKTEWQSIATQPEILDAIGTAFSIYKTDEDISHELKTCRLPENVLNELLKNINFDGFIQLSLTALRKILPLMEQGYRYDEACTQIYGNHHSGSLQQESKQFLPHIPIDDVRNPVVFRTLTQARKVVNAIIRRYGSPARVHIEMARELGKSKSDRDRIEKQQQKNKKERENAVAKFKEDFPDFVGEPRGKDILKMRLYEQQHGKCLYSGHDIDINRLNEKGYVEIDHALPFSRTWDDSQNNKVLVLGSENQNKRNQTPDEYLDGANNSQRWLEFQARVQTCHFSYGKKQRIQLAKLDDETEKGFLERNLNDTRYIARFMCQFVQENLYLTGKGKRLVFASNGGMTATLRNLWGLRKVREDNDRHHALDAIVVACSTASMQQKITKAFQRHESIEYVDTETGEVKFRIPQPWDFFRQEVMIRVFSDQPCEDLVEKLSARPEALHDNVTPLFVSRAPNRKMSGQGHLETIKSAKRLSEENSMVKKPLTTLKLKDIPEIVGYPSREPQLYAALKTRLETHDDDPIKAFAKPFYKPNKNGELGALVRSVRVKGVQNTGVMVHDGKGIADNATMVRVDVYTKAGKNYLVPVYVWQVAQGILPNRAVTSGKSEADWDLIDESFEFKFSLSRGDLVEMISNKGRIFGYYNGLDRANGSIGIREHDLEKSKGKDGVHRVGVKTATAFNKYHVDPLGKEIHRCSSEPRPTLKIKSKK

SEQ ID NO: 251 - protein, 1509 aa, Psychroflexus torquis
MKRILGLDLGTNSIGWSLIEHDFKNKQGQIEGLGVRIIPMSQEILGKFDAGQSISQTADRTKYRGVRRLYQRDNLRRERLHRVLKILDFLPKHYSESIDFQDKVGQFKPKQEVKLNYRKNEKNKHEFVFMNSFIEMVSEFKNAQPELFYNKGNGEETKIPYDWTLYYLRKKALTQQITKEELAWLILNFNQKRGYYQLRGEDIDEDKNKKYMQLKVNNLIDSGAKVKGKVLYNVIFDNGWKYEKQIVNKDEWEGRTKEFIITTKTLKNGNIKRTYKAVDSEIDWAAIKAKTEQDINKANKTVGEYIYESLLDNPSQKIRGKLVKTIERKFYKEEFEKLLSKQIELQPELFNESLYKACIKELYPRNENHQSNNKKQGFEYLFTEDIIFYQRPLKSQKSNISGCQFEHKIYKQKNKKTGKLELIKEPIKTISRSHPLFQEFRIWQWLQNLKIYNKEKIENGKLEDVTTQLLPNNEAYVTLFDFLNTKKELEQKQFIEYFVKKKLIDKKEKEHFRWNFVEDKKYPFSETRAQFLSRLAKVKGIKNTEDFLNKNTQVGSKENSPFIKRIEQLWHIIYSVSDLKEYEKALEKFAEKHNLEKDSFLKNFKKFPPFVSDYASYSKKAISKLLPIMRMGKYWSESAVPTQVKERSLSIMERVKVLPLKEGYSDKDLADLLSRVSDDDIPKQLIKSFISFKDKNPLKGLNTYQANYLVYGRHSETGDIQHWKTPEDIDRYLNNFKQHSLRNPIVEQVVMETLRVVRDIWEHYGNNEKDFFKEIHVELGREMKSPAGKREKLSQRNTENENTNHRIREVLKELMNDASVEGGVRDYSPSQQEILKLYEEGIYQNPNTNYLKVDEDEILKIRKKNNPTQKEIQRYKLWLEQGYISPYTGKIIPLTKLFTHEYQIEHIIPQSRYYDNSLGNKIICESEVNEDKDNKTAYEYLKVEKGSIVFGHKLLNLDEYEAHVNKYFKKNKTKLKNLLSEDIPEGFINRQLNDSRYISKLVKGLLSNIVRENGEQEATSKNLIPVTGVVTSKLKQDWGLNDKWNEIIAPRFKRLNKLTNSNDFGFWDNDINAFRIQVPDSLIKGFSKKRIDHRHHALDALVVACTSRNHTHYLSALNAENKNYSLRDKLVIKNENGDYTKTFQIPWQGFTIEAKNNLEKTVVSFKKNLRVINKTNNKFWSYKDENGNLNLGKDGKPKKKLRKQTKGYNWAIRKPLHKETVSGIYNINAPKNKIATSVRTLLTEIKNEKHLAKITDLRIRETILPNHLKHYLNNKGEANFSEAFSQGGIEDLNKKITTLNEGKKHQPIYRVKIFEVGSKFSISEDENSAKSKKYVEAAKGTNLFFAIYLDEENKKRNYETIPLNEVITHQKQVAGFPKSERLSVQPDSQKGTFLFTLSPNDLVYVPNNEELENRDLFNLGNLNVEQISRIYKFTDSSDKTCNFIPFQVSKLIFNLKKKEQKKLDVDFIIQNEFGLGSPQSKNQKSIDDVMIKEKCIKLKIDRLGNISKA

SEQ ID NO: 252 - protein, 1112 aa, Staphylococcus simulans
MLVGLKFKQSILFENMENAEDIKESATGSDAISLSDDYYENLSEFLTDEQLNFIESANTFFMGIMLDRILKGATSISAAKVRDYKIFKSQLKLIKDIVYQNKYDKYHEFFVTSKEDMRAYQENPDAKNFGKLSKFDQYLIHSKDQYAKLMKDLKGLVPKEYTEVLNLIDEQKFLVVQNTTDNASIPYQNNVFEAENILRNQQKYYPEITEEMIGKVINLISFRIPYYVGPLTNKNGQSDFAWMIRKSDEQTLPWNFDKVIDKSKSAEKFIRRMTSKCTYLLEEDVLPKHSLLYQEMEVLNELNNVQLRGENEPKHRIHRLDPKVKQFIYHNLFQKKKNVTHKDLITLLQNSEHRNTLNKTSGQKLKVFGTQNDSKFASKLSTYNDMKAILGSVENKRQMIEELVLWITIFEDKAILKQKIGEKYPNITEKQLNQIVKLNYSGWGRLSEKLLTKEVNGRSLIDLMYSTENNFMEIITDKTLGFDCFIKNSNKVKNAKISYKDVAELRTSPALKKGIWNAIKMVREISNLFGAPEKIIIEFATEDQAKGKRQKSRSELWDDLVKKNNLKRNKEFEGLFEELKAYPDLDFSNPKLWLYIHQNGKCMYTKKPIDLERLMSDTNNQLYEIDHILPRTFVKDDSINNKVLVIQSANQKKSGDKMPLEIFDNHVLVPFWKMLYENDLISSSKLSKLMKKEFNDLDKEGFIQRQLVETRQIISHVSDFLTEEYPSTTVVPMKANVVSELRRKFDIPKIRQLNDWHHAVDAYLNGFVYQAARVFYPKVNLFEFNFKWEKVREKWRQLGEFTENNKKREFFLFKRMENYVNEYGEGMISKLIFDLDNFKFNYSRKVESTESAFYKQSAFSPKNTTAQYDSDKNKTAIYKEMKNKRGIVVSYTYVKKDQELIGYGVFNETVFEYVNNADVDMNTRALKIVRKAFPKLDIKKAQYLFSINKGDALLVNGHPFLFVSAYERINGKQLEFDIAMQRKIKQALSPYNNMTEQEKVEFYNQFAEKVIEEFRNSIGLQSRDRKVNLIKNLFNNTEKSNDSMTQSILEVLKMTKVSAERSKELKIRWNGQTPNTFIDTKNNAEIQYKSITGLKTTKPKSIFKLAESKNEL

SEQ ID NO: 253 - protein, 1274 aa, Mycoplasmoides gallisepticum
MNINMNNSIKSKPEVTIGLDLGVGSVGWAIVDNETNIIHHLGSRLFSQAKTAEDRRSFRGVRRLIRRRKYKLKRFVNLIWKYNSYFGFKNKEDILNNYQEQQKLHNTVLNLKLEALNAKIDPKALSWILHDYLKNRGHFYEDNRDFNVYPTEELANYFDEFGYYKGIIDSKNDDDDKLEEGLTKYKFSNQHWLEEVKKVLSNQTGLPEKFKEEYESLFSYVRNYSEGPGSINSVSPYGIYHLDEKEGKVVQKYNNIWDKTIGKCSIFPDEYRAPKNSPIAMIFNEINELSTIRSYSIYLTGWFINQEFKKAYLNKLLDLLIKTNSEKPIDARQFKKLREETIAESIGKETLKDVESEEKLEKDDHKWKLKGLKLNTNGKIQYNDLSSLAKFVHKLKQHLKLDFLLEDQYTPLDKINFLQSLYVYLGKHLRYSNRVDSANLKEFSDSSRLFERVLQEQKDGLFKLFEQTDKDDEKILTQTHSLSTKAMLLAITRMTNLDNDEDNQKNNDKGWNFEAIKNFDQKFIDITKTNNNLSLKQDKRYLDDQFINDAILSPGVKRILREATKVFNAILKQFSEEYDVTKVVIELARELSEEKELENTKNYKKLIKKNGDKISEGLKALGIAEDKIEEILKSPTKSYKVLLWLQQDHIDPYSQKEIAFDDILTKTEKTEIDHIIPYSISFDDSSSNKLLVLAESNQAKSNQTPYEFINSGKAEITWEVYEAYCHKFKNGDSSLLDSTQRSKKFAKMMKTDTSSKYDIGFLARNLNDTRYATIVFRDALKDYANNHLVEDKPMFKVVCINGGVTSFLRKNFDPKSWYAKKDRDKNIHHAVDASIISIFSNETKTLFNQLTKFADYKLFKNTDGSWKKIDPKTGVVSEVTDENWKQIRVRNQVSEIAKVIDKYIQDSNIERKARYSRKIENKTNISLFNDTVYSAKKVGYEDQIKRKNLKTLDIHESAEENKNSKVKKQFVYRKLVNVSLLNNDKLADLFAEKEDILMYRANPWVINLAEQIFNEYTENKKIKSQNVFEKYMLDLTKEFPEKFSEAFVKSMIRNKTAIIYNVEKDVVHRIKRLKILSSELKENKWSNVIIRSKNESGTKLSYQDTINSIALMIMRSIDPTAKKQYIRVPLNTLNLHLGDQDFDLHNIDAYLKKPKFVKYLKANEIGDEYKPWRVLTSGTLLIHKKDKKLMYISSFQNLNDLIEIKNLIETEYKENVDSDPKKKKKASQILRSLSVILNDYILLDAKYNFDILGLSKNKIDEILNSKLDLDKIAK

SEQ ID NO: 254 - protein, 1122 aa, synthetic construct; identical to SEQ ID NO: 23

SEQ ID NO: 255 - protein, 1236 aa, synthetic construct; identical to SEQ ID NO: 21

SEQ ID NO: 256 - protein, 1059 aa, synthetic construct; identical to SEQ ID NO: 15

SEQ ID NO: 257 - protein, 1166 aa, synthetic construct; identical to SEQ ID NO: 39

SEQ ID NO: 258 - protein, 1149 aa, synthetic construct; identical to SEQ ID NO: 37

SEQ ID NO: 259 - protein, 1314 aa, synthetic construct; identical to SEQ ID NO: 27

SEQ ID NO: 260 - protein, 1064 aa, synthetic construct; identical to SEQ ID NO: 38

SEQ ID NO: 261 - protein, 1401 aa, synthetic construct
MDKKYSIGLDIGTNSVGWAVITDEYKVPSKKFKVLGNTDRHSIKKNLIGALLFDSGETAEATRLKRTARRRYTRRKNRICYLQEIFSNEMAKVDDSFFHRLEESFLVEEDKKHERHPIFGNIVDEVAYHEKYPTIYHLRKKLVDSTDKADLRLIYLALAHMIKFRGHFLIEGDLNPDNSDVDKLFIQLVQTYNQLFEENPINASGVDAKAILSARLSKSRRLENLIAQLPGEKKNGLFGNLIALSLGLTPNFKSNFDLAEDAKLQLSKDTYDDDLDNLLAQIGDQYADLFLAAKNLSDAILLSDILRVNTEITKAPLSASMIKRYDEHHQDLTLLKALVRQQLPEKYKEIFFDQSKNGYAGYIDGGASQEEFYKFIKPILEKMDGTEELLVKLNREDLLRKQRTFDNGSIPHQIHLGELHAILRRQEDFYPFLKDNREKIEKILTFRIPYYVGPLARGNSRFAWMTRKSEETITPWNFEEVVDKGASAQSFIERMTNFDKNLPNEKVLPKHSLLYEYFTVYNELTKVKYVTEGMRKPAFLSGEQKKAIVDLLFKTNRKVTVKQLKEDYFKKIECFDSVEISGVEDRFNASLGTYHDLLKIIKDKDFLDNEENEDILEDIVLTLTLFEDREMIEERLKTYAHLFDDKVMKQLKRRRYTGWGRLSRKLINGIRDKQSGKTILDFLKSDGFANRNFMQLIHDDSLTFKEDIQKAQVSGQGDSLHEHIANLAGSPAIKKGILQTVKVVDELVKVMGRHKPENIVIEMARENQTTQKGQKNSRERMKRIEEGIKELGSQILKEHPVENTQLQNEKLYLYYLQNGRDMYVDQELDINRLSDYDVDHIVPQSFLKDDSIDNKVLTRSDKNRGKSDNVPSEEVVKKMKNYWRQLLNAKLITQRKFDNLTKAERGGLSELDKAGFIKRQLVETRQITKHVAQILDSRMNTKYDENDKLIREVKVITLKSKLVSDFRKDFQFYKVREINNYHHAHDAYLNAVVGTALIKKYPKLESEFVYGDYKVYDVRKMIAKSEQEIGKATAKYFFYSNIMNFFKTEITLANGEIRKRPLIETNGETGEIVWDKGRDFATVRKVLSMPQVNIVKKTEVQTGGFSKESILPKRNSDKLIARKKDWDPKKYGGFDSPTVAYSVLVVAKVEKGKSKKLKSVKELLGITIMERSSFEKNPIDFLEAKGYKEVKKDLIIKLPKYSLFELENGRKRMLASAGELQKGNELALPSKYVNFLYLASHYEKLKGSPEDNEQKQLFVEQHKHYLDEIIEQISEFSKRVILADANLDKVLSAYNKHRDKPIREQAENIIHLFTLTNLGAPAAFKYFDTTIDRKRYTSTKEVLDATLIHQSITGLYETRIDLSQLGGDAYPYDVPDYASLGSGSPKKKRKVEDPKKKRKVD

SEQ ID NO: 262 - protein, 1368 aa, synthetic construct
MDKKYSIGLAIGTNSVGWAVITDDYKVPSKKLKGLGNTDRHGIKKNLIGALLFDSGETAEATRLKRTARRRYTRRKNRICYLQEIFSNEMAKVDDSFFHRLEESFLVEEDKKHERHPIFGNIVDEVAYHEKYPTIYHLRKKLADSTDKVDLRLIYLALAHMIKFRGHFLIEGDLNPDNSDVDKLFIQLVQTYNQLFEENPINASRVDAKAILSARLSKSRRLENLIAQLPGEKKNGLFGNLIALSLGLTPNFKSNFDLAEDAKLQLSKDTYDDDLDNLLAQIGDQYADLFLAAKNLSDATLLSDILRVNSEITKAPLSASMIKRYDEHHQDLTLLKALVRQQLPEKYKEIFFDQSKNGYAGYIDGGASQEEFYKFIKPILEKMDGTEELLAKLNREDLLRKQRTFDNGSIPYQIHLGELHAILRRQEDFYPFLKDNREKIEKILTFRIPYYVGPLARGNSRFAWMTRKSEETITPWNFEEVVDKGASAQSFIERMTNFDKNLPNEKVLPKHSLLYEYFTVYNELTKVKYVTEGMRKPAFLSGEQKKAIVDLLFKTNRKVTVKQLKEDYFKKIECFDSVEISGVEDRFNASLGTYHDLLKIIKDKDFLDNEENEDILEDIVLTLTLFEDREMIEERLKTYAHLFDDKVMKQLKRRRYTGWGRLSRKLINGIRDKQSGKTILDFLKSDGFANRNFMQLIHDDSLTFKEDIQKAQVSGQGDSLHEHIANLAGSPAIKKGILQTVKVVDELVKVMGRHKPENIVIEMARENQTTQKGQKNSRERMKRIEEGIKELGSDILKEYPVENTQLQNEKLYLYYLQNGRDMYVDQELDINRLSDYDVDHIVPQSFLKDDSIDNKVLTRSDKNRGKSDNVPSEEVVKKMKNYWRQLLNAKLITQRKFDNLTKAERGGLSELDKVGFIKRQLVETRQITKHVAQILDSRMNTKYDENDKLIREVRVITLKSKLVSDFRKDFQFYKVREINNYHHAHDAYLNAVVGTALIKKYPKLESEFVYGDYKVYDVRKMIAKSEQEIGKATAKYFFYSNIMNFFKTEITLANGEIRKRPLIETNGETGEIVWDKGRDFATVRKVLSMPQVNIVKKTEVQTGGFSKESILPKRNSDKLIARKKDWDPKKYGGFDSPTVAYSVLVVAKVEKGKSKKLKSVKELLGITIMERSSFEKDPIDFLEAKGYKEVRKDLIIKLPKYSLFELENGRKRMLASAGELQKGNELALPSKYVNFLYLASHYEKLKGSPEDNEQKQLFVEQHKHYLDEIIEQISEFSKRVILADANLDKVLSAYNKHRDKPIREQAENIIHLFTLTNLGAPAAFKYFDTTIDRKRYTSTKEVLDATLIHQSITGLYETRIDLSQLGGD

SEQ ID NO: 263 - protein, 1368 aa, synthetic construct
MDKKYSIGLDIGTNSVGWAVITDDYKVPSKKLKGLGNTDRHGIKKNLIGALLFDSGETAEATRLKRTARRRYTRRKNRICYLQEIFSNEMAKVDDSFFHRLEESFLVEEDKKHERHPIFGNIVDEVAYHEKYPTIYHLRKKLADSTDKVDLRLIYLALAHMIKFRGHFLIEGDLNPDNSDVDKLFIQLVQTYNQLFEENPINASRVDAKAILSARLSKSRRLENLIAQLPGEKKNGLFGNLIALSLGLTPNFKSNFDLAEDAKLQLSKDTYDDDLDNLLAQIGDQYADLFLAAKNLSDATLLSDILRVNSEITKAPLSASMIKRYDEHHQDLTLLKALVRQQLPEKYKEIFFDQSKNGYAGYIDGGASQEEFYKFIKPILEKMDGTEELLAKLNREDLLRKQRTFDNGSIPYQIHLGELHAILRRQEDFYPFLKDNREKIEKILTFRIPYYVGPLARGNSRFAWMTRKSEETITPWNFEEVVDKGASAQSFIERMTNFDKNLPNEKVLPKHSLLYEYFTVYNELTKVKYVTEGMRKPAFLSGEQKKAIVDLLFKTNRKVTVKQLKEDYFKKIECFDSVEISGVEDRFNASLGTYHDLLKIIKDKDFLDNEENEDILEDIVLTLTLFEDREMIEERLKTYAHLFDDKVMKQLKRRRYTGWGRLSRKLINGIRDKQSGKTILDFLKSDGFANRNFMQLIHDDSLTFKEDIQKAQVSGQGDSLHEHIANLAGSPAIKKGILQTVKVVDELVKVMGRHKPENIVIEMARENQTTQKGQKNSRERMKRIEEGIKELGSDILKEYPVENTQLQNEKLYLYYLQNGRDMYVDQELDINRLSDYDVDAIVPQSFLKDDSIDNKVLTRSDKNRGKSDNVPSEEVVKKMKNYWRQLLNAKLITQRKFDNLTKAERGGLSELDKVGFIKRQLVETRQITKHVAQILDSRMNTKYDENDKLIREVRVITLKSKLVSDFRKDFQFYKVREINNYHHAHDAYLNAVVGTALIKKYPKLESEFVYGDYKVYDVRKMIAKSEQEIGKATAKYFFYSNIMNFFKTEITLANGEIRKRPLIETNGETGEIVWDKGRDFATVRKVLSMPQVNIVKKTEVQTGGFSKESILPKRNSDKLIARKKDWDPKKYGGFDSPTVAYSVLVVAKVEKGKSKKLKSVKELLGITIMERSSFEKDPIDFLEAKGYKEVRKDLIIKLPKYSLFELENGRKRMLASAGELQKGNELALPSKYVNFLYLASHYEKLKGSPEDNEQKQLFVEQHKHYLDEIIEQISEFSKRVILADANLDKVLSAYNKHRDKPIREQAENIIHLFTLTNLGAPAAFKYFDTTIDRKRYTSTKEVLDATLIHQSITGLYETRIDLSQLGGD

SEQ ID NO: 264 - protein, 1368 aa, synthetic construct
MDKKYSIGLAIGTNSVGWAVITDDYKVPSKKLKGLGNTDRHGIKKNLIGALLFDSGETAEATRLKRTARRRYTRRKNRICYLQEIFSNEMAKVDDSFFHRLEESFLVEEDKKHERHPIFGNIVDEVAYHEKYPTIYHLRKKLADSTDKVDLRLIYLALAHMIKFRGHFLIEGDLNPDNSDVDKLFIQLVQTYNQLFEENPINASRVDAKAILSARLSKSRRLENLIAQLPGEKKNGLFGNLIALSLGLTPNFKSNFDLAEDAKLQLSKDTYDDDLDNLLAQIGDQYADLFLAAKNLSDATLLSDILRVNSEITKAPLSASMIKRYDEHHQDLTLLKALVRQQLPEKYKEIFFDQSKNGYAGYIDGGASQEEFYKFIKPILEKMDGTEELLAKLNREDLLRKQRTFDNGSIPYQIHLGELHAILRRQEDFYPFLKDNREKIEKILTFRIPYYVGPLARGNSRFAWMTRKSEETITPWNFEEVVDKGASAQSFIERMTNFDKNLPNEKVLPKHSLLYEYFTVYNELTKVKYVTEGMRKPAFLSGEQKKAIVDLLFKTNRKVTVKQLKEDYFKKIECFDSVEISGVEDRFNASLGTYHDLLKIIKDKDFLDNEENEDILEDIVLTLTLFEDREMIEERLKTYAHLFDDKVMKQLKRRRYTGWGRLSRKLINGIRDKQSGKTILDFLKSDGFANRNFMQLIHDDSLTFKEDIQKAQVSGQGDSLHEHIANLAGSPAIKKGILQTVKVVDELVKVMGRHKPENIVIEMARENQTTQKGQKNSRERMKRIEEGIKELGSDILKEYPVENTQLQNEKLYLYYLQNGRDMYVDQELDINRLSDYDVDAIVPQSFLKDDSIDNKVLTRSDKNRGKSDNVPSEEVVKKMKNYWRQLLNAKLITQRKFDNLTKAERGGLSELDKVGFIKRQLVETRQITKHVAQILDSRMNTKYDENDKLIREVRVITLKSKLVSDFRKDFQFYKVREINNYHHAHDAYLNAVVGTALIKKYPKLESEFVYGDYKVYDVRKMIAKSEQEIGKATAKYFFYSNIMNFFKTEITLANGEIRKRPLIETNGETGEIVWDKGRDFATVRKVLSMPQVNIVKKTEVQTGGFSKESILPKRNSDKLIARKKDWDPKKYGGFDSPTVAYSVLVVAKVEKGKSKKLKSVKELLGITIMERSSFEKDPIDFLEAKGYKEVRKDLIIKLPKYSLFELENGRKRMLASAGELQKGNELALPSKYVNFLYLASHYEKLKGSPEDNEQKQLFVEQHKHYLDEIIEQISEFSKRVILADANLDKVLSAYNKHRDKPIREQAENIIHLFTLTNLGAPAAFKYFDTTIDRKRYTSTKEVLDATLIHQSITGLYETRIDLSQLGGD

SEQ ID NO: 265 - protein, 240 aa, Acetobacter aceti
MANIAENLVFGIDLGIGSCGWAVLNQKAKDENIVALGSWCFDVPETDKERIPTNQIRRANRLLRRVIRRRRNRMAEIRRLFASKGMLDTADPDALAKISADPWEMRAKGLDYQLTPQEFAVALGHIAKRRGFKSAAKRVSTNAPSEDSKMLAALEKTKEQSAQYRTIGEMFARDPAYADRRRNRDGCFDRTMSREDLFKETQILFESQRRLGNFSATSETEQAFIDIAFRQKPMQDSERL

SEQ ID NO: 266 - protein, 400 aa, Acetobacter aceti
SFERFRLLCRLVNLRVTDGLEDRPLTPEELRLACEDAGKTRKLSVKKVRSLIGLRDDQRFTTIPPDQEQHDIAARTGDALTGTATFRAILGESFWRQLLPHPEQLDRAAWIISFHELTDTIISKLATIGLPSEVMELIRKALEDGKFSKFKGAASLSDKAARKLIPFLQEGLTYDKACQKAGYNHAASKFTHYDSIDTKAKFNSLMDDVRDSITNPVARKAISEGMKQVWAMRNQWGLPGAICIELARDVGNSAEKRREIESGIKKNTAQRERERQEAKEHLNQSDISSETLLRYRLWKEQGGRCCYTDQPITPSQLIASDNSVQVDHILPWSRFGDDSYLNKALCTAKANQEKKNRTPWEWIHNQKGVEAWNHFTAAVESRKETRGLKKRNFLLKSSKE

SEQ ID NO: 267 - protein, 376 aa, Acetobacter aceti
YAARVMAEAVRLLYPSGNRAEKGGVKRVFTRPGALTAALRHAWGVESLKKINGKRLNDDRHHALDAAVVAAVSEKEIQKLTKSFQICEQKGLARPMRDVPMPWEGFRHQLETAYADIRVARPERRRARGKGHDATIRQLREEKDGPVVYERRAISDLKLTDLERIKDPERNSAIISSLRTWIEKGKPADYPPQSPKGDEIRKIRVMSRNKPAVSVRGGTADRGEMTRVDVFTKMGKKGKPEWFLVPIYRHQVIDRIQWPQPPNQAAANGKSEKNWPTMGLEHEFRFSLYPRSYVQIVKRDGEIIEGYFAGLDRTVAAFSLLSSSDPTSIQRGIGAKTLESIRKYNVNRFGDISMVEQETRTWHGDVCISPDQPDSA

SEQ ID NO: 268 - protein, 1054 aa, Actinobacillus suis
MKLTPLNYILGLDLGIASVGWAVVEIDEQENPLGLIDVGVRTFDRAEVPKTGESLALARRLARSARRLVKRRADRIKKAKRLLKAENILLSADEHLPNDVWQLRVKGLDQKLERQEWAAVLLHLLKHRGYLSQRKNESKSENKELGALLSGVETNHQILQSAEYRTPAEIAVKKFHVEDGHIRNQRGAYTHTFSRLDLLAEMELLFQRQTDLGNPHTSAKLLENLTALLMWQKPALAGEAILKMLGKCTFEPTEYKAAKNSYSAERFVWLTKLNNLRILEQGAERALTDNERFALLDQPYEKAKFTYAQARTMLALPDEAIFKGVRYQGEDKKAVETKTILMEMKAYHQIRKALENADLKAEWNELKNNSELLDDIGTAFSLHKTDEDICRYLDGKLSESILNALLENLNFDKFIQLSLKALQQILPLMLQGQRYDEAVSAIYGDHYGKKSAEINRLLPTIPADEIRNPVVLRTLTQARKVINAVVRLYGSPARIHIETGREVGKSYQDRKKLEKQQEDNRKQRESAVKKFKEYFPNFVGEPKGKDILKMRLYELQQAKCLYSGKSLELHRLLEKGYVEVDHALPFSRTWDDSFNNKVLVLANENQNKGNLTPYEWLDGKNNSEHWQNFVARVQTSGFSHTKKQRILSHKLDEKGFIERNLNDTRYVARFLCNFIADNMLLTGKGKRKVFASNGQITALLRGRWGLQKVRDDNDRHHALDAVVVACSTVVMQQKITRFVRYEEGNVFSGERIDRETGEIIPLHFPSPWAFFRENVEIRIFSENPKLELENRLPDYPQYNHEFVQPLFVSRMPTRKMTGQGHMETVKSAKRLDEGLSVLKVPLTQLKLSDLERMVNREREVTLYESLKARLEQFGNDPAKAFAEPFHKKGGAVVKAVRVEQTQKSGVLVRDGNGVADNASMVRVDVFTKGGKYFLVPIYTWQVAKGILPNKAVTANVDEIDWLEMDESYQFIFTMYPNDLVKVKLKKEEFFGYYGGLDRATGAIVIKEHDLEKSKGKQGIYRIGVKLALSFEKYQVDELGKNIRPCRPTKRQHVR

SEQ ID NO: 269 - protein, 239 aa, Actinobacillus ureae
MEIRIFSENPKLGLENRLPGYPQYNHEFVQPLFVSRMPTRKMTGKGHMETVKSAKRLDEGLSVLKVPLTQLKLSDLERMVNREREDALYQSLKAHLEQFGNDPAKAFAEPFHKKGGTVVKAVRVEQTQKSGVLVRDGNGVADNTSMVRVDVFTKAGKYFLVPIYKWQVAKRILPNKAVTAGVDEIDWLEMDSSYQFIFTMYANDLVKVKLKKRSILGLLRWFRSCNWGYCYQRTRFREI

SEQ ID NO: 270 - protein, 400 aa, Actinobacillus ureae
MKLTPLNYILGLDLGIASVGWAVVEIDEQENPLGLIDVGVRTFDRAEVAKTGESLALARRLARSSRRLVKRRADRIKKAKRLLKAENLLLSADEILPNDVWQLRVKGLDQKLERQEWAAVLLHILKHRGYLSQRKNESKSENKELGALLSGVATNHQLLQTAEYRTPAEITVKKFQAEENGHGHIRNQRGDYSHTFDRKDLLAEMKLLFQRQAELGNPHTSEKLLENLTTLLLWQKPALAGEAILKMLGKCTFEPAEYKAAKNSYSAERFVWLTKLNNLRILENGIERALTDNERFTLLDQPYEKAKLTYAQARTMLALSDEAIFKGVRYQGEDKKAAEKVALIEMKGYQHIRKALEGAGLKAEWNELKNNSELLDDIGTAFSLYFSISNLPTEIAYFTP

SEQ ID NO: 271 - protein, 1113 aa, Actinomyces georgiae
MSASSQNVERIRYKVGIDVGLRSIGFCAVQVDADDRPVKLLNTVVHVHDAGVSPADAKKADTRKLVSGVARRTRRLYRTRKRRLVDLDRQLDGLGWPLVDPARFADPREPWFAREKLVSGRVDDADERKELLSVALRHIAHHRGWRNPYSTVESLQADAPPSEFLQGLNQRVSEKLGTELDPGLTQGQLVAKLLHRFPNAKIRGPEGILRGKLHQSDNAGELRLICRTQGLDCHITEELVRLVFQAKSPKANKEMRKRIGRDQLPGQGAHIRAEKAHPVFQRFRIVAVLANLRIREAHVDRRLTAEEMRTLTDFLLGLAGSEQPTWEELADNLNIERHQLRGTAKASVDGAPALRFPPIDATTDRIYASKLKWLAEWWRQADEERRGYMVDALSNSGGSEDEPYLDDEIAEMLEQASEEDQAKLDSLHLPGGRASYCLDTLRRLTDAMLGGGLDLFEARKAVFHVDDDWAPPTDPIGAPVGNPPVDRVLKHVARWLEAATGRWGAPQTINIEHVREGLGSEKAARELTRMNDRRRRNNQKLVEEMGEKLGMSGRIRRSDRMRYEAIRRQNCECLYCGQPITYQTMEMDHIVPRAGAASTNSRSNLAAVCRRCNHQKGKLPFAVWAESQDSPAEVRLQDAVQRVRHWLRDAGMGQKELQALRVQVIARLKSKRPDEEFDGRSMESIAWMANELRARVEAQYRGSGTTVRVYRGALTAEARKASGFEGRVNLIGGRGKDRFDRRHHAMDALVIALMNQSVAQTLALRLNMRDSQWLTQSEQTWRQFHGAPGEAARKWEAWDRDMRDASDLFNLALDGGRIPITENVRLRVGNGRVHEDGVIRFKPEYEVKGKTIKGGEARLLGDSLPSEQIDRAETPALWTALTRLPEYDRKSGLPENPDRVIRVNGAVVQATDRIRFFGTPASVAVRGGYAKLGESIHHARIYRINGKTPKYAMIRVYTIDLMRLNHEDIFTAVLKPSTISMRCAEKKLKYAIAEGNAEQIGWLVEGDQLELDAAAYAKGVGADLMREYPMATCWRVAGFPDEAKLRLRPVLLAAEGMGEDAPKFMREVLENQGWRPAVNALLSPGSVRVVRRNVLGEPRFKSSGHLPTTVDLV

SEQ ID NO: 272 - protein, 1101 aa, Actinomyces naeslundii
MWYASLMSAHHLRVGIDVGTHSVGLATLRVDDHGTPIELLSALSHIHDSGVGKEGKKDHDTRKKLSGIARRARRLLHHRRTQLQQLDEVLRDLGFPIPTPGEFLDLNEQTDPYRVWRVRARLVEEKLPEELRGPAISMAVRHIARHRGWRNPYSKVESLLSPAEESPFMKALRERILATTGEVLDDGITPGQAMAQVALTHNISMRGPEGILGKLHQSDNANEIRKICARQGVSPDVCKQLLRAVFKADSPRGSAVSRVAPDPLPGQGSFRRAPKCDPEFQRFRIISIVANLRISETKGENRPLTADERRHVVTFLTEDSQADLTWVDVAEKLGVHRRDLRGTAVHTDDGERSAARPPIDATDRIMRQTKISSLKTWWEEADSEQRGAMIRYLYEDPTDSECAEIIAELPEEDQAKLDSLHLPAGRAAYSRESLTALSDHMLATTDDLHEARKRLFGVDDSWAPPAEAINAPVGNPSVDRTLKIVGRYLSAVESMWGTPEVIHVEHVRDGFTSERMADERDKANRRRYNDNQEAMKKIQRDYGKEGYISRGDIVRLDALELQGCACLYCGTTIGYHTCQLDHIVPQAGPGSNNRRGNLVAVCERCNRSKSNTPFAVWAQKCGIPHVGVKEAIGRVRGWRKQTPNTSSEDLTRLKKEVIARLRRTQEDPEIDERSMESVAWMANELHHRIAAAYPETTVMVYRGSITAAARKAAGIDSRINLIGEKGRKDRIDRRHHAVDASVVALMEASVAKTLAERSSLRGEQRLTGKEQTWKQYTGSTVGAREHFEMWRGHMLHLTELFNERLAEDKVYVTQNIRLRLSDGNAHTVNPSKLVSHRLGDGLTVQQIDRACTPALWCALTREKDFDEKNGLPAREDRAIRVHGHEIKSSDYIQVFSKRKKTDSDRDETPFGAIAVRGGFVEIGPSIHHARIYRVEGKKPVYAMLRVFTHDLLSQRHGDLFSAVIPPQSISMRCAEPKLRKAITTGNATYLGWVVVGDELEINVDSFTKYAIGRFLEDFPNTTRWRICGYDTNSKLTLKPIVLAAEGLENPSSAVNEIVELKGWRVAINVLTKVHPTVVRRDALGRPRYSSRSNLPTSWTIE

SEQ ID NO: 273 - protein, 1181 aa, Actinomyces sp.
MLHCIAVIRVPPSEEPGFFETHADSCALCHHGCMTYAANDKAIRYRVGIDVGLRSIGFCAVEVDDEDHPIRILNSVVHVHDAGTGGPGETESLRKRSGVAARARRRGRAEKQRLKKLDVLLEELGWGVSSNELLDSHAPWHIRKRLVSEYIEDETERRQCLSVAMAHIARHRGWRNSFSKVDTLLLEQAPSDRMQGLKERVEDRTGLQFSEEVTQGELVATLLEHDGDVTIRGFVRKGGKATKVHGVLEGKYMQSDLVAELRQICRTQRVSETTFEKLVLSIFHSKEPAPSAARQRERVGLDELQLALDPAAKQPRAERAHPAFQKFKVVATLANMRIREQSAGERSLTSEELNRVARYLLNHTESESPTWDDVARKLEVPRHRLRGSSRASLETGGGLTYPPVDDTTVRVMSAEVDWLADWWDCANDESRGHMIDAISNGCGSEPDDVEDEEVNELISSATAEDMLKLELLAKKLPSGRVAYSLKTLREVTAAILETGDDLSQAITRLYGVDPGWVPTPAPIEAPVGNPSVDRVLKQVARWLKFASKRWGVPQTVNIEHTREGLKSASLLEEERERWERFEARREIRQKEMYKRLGISGPFRRSDQVRYEILDLQDCACLYCGNEINFQTFEVDHIIPRVDASSDSRRTNLAAVCHSCNSAKGGLAFGQWVKRGDCPSGVSLENAIKRVRSWSKDRLGLTEKAMGKRKSEVISRLKTEMPYEEFDGRSMESVAWMAIELKKRIEGYFNSDRPEGCAAVQVNAYSGRLTACARRAAHVDKRVRLIRLKGDDGHHKNRFDRRNHAMDALVIALMTPAIARTIAVREDRREAQQLTRAFESWKNFLGSEERMQDRWESWIGDVEYACDRLNELIDADKIPVTENLRLRNSGKLHADQPESLKKARRGSKRPRPQRYVLGDALPADVINRVTDPGLWTALVRAPGFDSQLGLPADLNRGLKLRGKRISADFPIDYFPTDSPALAVQGGYVGLEFHHARLYRIIGPKEKVKYALLRVCAIDLCGIDCDDLFEVELKPSSISMRTADAKLKEAMGNGSAKQIGWLVLGDEIQIDPTKFPKQSIGKFLKECGPVSSWRVSALDTPSKITLKPRLLSNEPLLKTSRVGGHESDLVVAECVEKIMKKTGWVVEINALCQSGLIRVIRRNALGEVRTSPKSGLPISLNLR

SEQ ID NO: 274 - protein, 1120 aa, Actinomyces sp.
MNAMKQYNAGIDVGINSVGFAAIEVDSKGLPLNILNNMVVLHDSGVDPGTAKTGATRLANSGTARRTRKLIARRRKRLQKLDRYIEVQGWPLVDFSSLPDPYTPWKIRAKLTQDRLEGEEQGRGLSIALRHMARHRGWRNPYEGVESLHSPKEASKQFKDLKDRVTKVSGVIFDEDATPAEVVCDIGLSPKQRLRSAPSAKYKEGATLADEPVGGKSKEGLLGGKLMQSDNANELRKIGIVQGLSNEKVNEIIDQVFASESPKGQAGKRAKKDELPGQEQYVRALRAHLAFQRFRIVAAVANLRILEAEPKHERLLSQSEKDKVIEFLMSADGDDGVTWSDVAEELGIERECLSGTAKRGADGERPSSFPPTNSTNISIVRSKVKPLIEWWRKASDDEQATLVTALSNADELTDDQPSAETVRQFLSSPDEQSQEKIDKISLPKGRAAYSVNSLERLTRRMLKDSVDLFEARKREFGVDNNWTPTPDSIGEPVGNPAVDRVLKIVNRWLLAVTRKWGPPKVVNIEHVRVGFTSAAQTRKYEEENKTNRERNLAILEELRDKFGTSGKIRREDITRFAALRRQNCQCAYCGEAITFFDCEMDHIVPRKGPGSTNTRNNLVAICERCNKSKSNMPFSLWAQNCDIPGVSVEAVIDRVRTWIKDPELNPKQYNNFKKDVIERLRKTVDDDAIDNRSIESVAWMATELADRIGSHFRTAGANTKVRVYRGWLTSEARKASGFEGKINLIGGRGKTRLDRRHHAMDAATIALMRQSVAQTLVERASIRESDRLRRVVSSSWKDYRGADRDKQFSYGSWLNSMNALAELFNRAIDADGIPVTQNLRLRLGNGEAHDATIRSLEKKRVGASWTIGEIDRASTPQLWLALTRQEDFDQNDGLPANASRELRVKNHWFHAEENVTLFPTKSAAIAVRGGYAEIGNTIHHARLYKLPGKKLTYGMIRVFAIDLLCAWHTDLFSSPLLPESISLRTAETKVRRAVEDGAAMYIGWLVDGDEIVLDPETKAFKSNKIGEYLCEFPGTKRWKVDGFPDKEKLRLRPLQLAGEGLPEDVSAGTEEILGPKGNGWRVAINALFKSSQLVVVRRTALGMVRKLSRRHLPLTTRLRG

SEQ ID NO: 275 - protein, 1095 aa, Actinomyces sp.
MPAHHLRVGIDVGTHSVGLATLRVDDQGTPIELLSALSHIHDSGIGKEGQKDHDTRKKLSGVARRTRHLLRNRRERLQQLDKVLVDLGFPIPKPEEYPDLSERTDPYRVWRVRARLVEETLPEELRGPAISMAVRHIARHRGWRNPYSKVESLLSPAEESSFMKALRKRIMTKTGEVLDDDITPGQAMAQVALTHKIYMRGPEGILGKLHQSDNANEIRKICARQGISSDVCKQLLRAVFKAESPRGSAVSRVAPDPLPGQGSFRRAPKCDPEFQRFRIISIVANLRISETKGENRPLTVDERRQVVAFLMEDSQADLTWVDVAEKLRVSRQALRGTAMLTADGERSAAQPPIDVTDQIMRKTKISALKTWWDKADAERRGAMVRYLYEGLEDSECAEVIAKLPEKDHAKLDSLHLPAGRAAYSRESLTALSDHMLETTNDLHEARKRLFGVDDSWAPPAEPVGAPVGNPSVDRTLKIVARYLSAVESIWGTPEVIHVEHVRDGFTSERTAEERDKANRSRHNDNQKAIEKIQHDYGKEGYISRGDIVRFHALKLQGSACLYCGTTIGYHTCQLDHIVPQAGPGSNNRRGNLVAVCERCNHSKSNTPFAVWAQKCGIPHVGVKEAISRVNGWVEHNHSTSSGDLTRLKKEVIARLRRTQKDPEIDERSMESVAWMANELHHRIAAAYPETTVMVYRGSITAAARKAASIESRINLIGEKGRKDRLDRRHHAVDASVVALMEPSVAKTLAERSSLRGEQRLTGQEQTWKQYTGLTVGARERFEAWRGHMHRLTELFNESLAADEVYVTQNIRLRLSDGSAHTVKASKLVSHRLGDGLTVQQIDRACTPALWCALTREIDFDEKNGLPAREDRVIRVHGQEISSADCIQVFSKRKKTKSDRDEAPFGAIAVRGGFVEIGSSIHHARIYRIEGEKPAYAMLRVFTHDLLSQRHGDLFSAVIPPQSISMRCAATELRQAISEGRATYLGWIVSGDELHIPVETFTTHKIGSFLKDYPNTTRWRICGYDSETMLILKPRILSAEGLNNSSDIAEYVIKNKGWRVAINKLAKVHPTVVRRDALGRPRHSSRSNLPVTWSIE

SEQ ID NO: 276 - protein, 1144 aa, Actinomyces sp.
MSMIDSSENVPGIRYRVGIDVGLKSIGFCAVEVDRNDQPVRMLNSMVFIHDAGVDPNENKAAKSRKLTAGVARRTRRLYRTRHQRLVNLDRVLSKEFGWPLPDLTSFKDPREPWHVRAGLLEGYIADDEKRKEALSIALRHIARHRGWRNPYAKVETLLQPSEPSDFLKGLNDRISEELGRAFPADATPGQLVDTYLAHPDYVGRAGTPKLRGPQGILAGKLHQSDNAQEIRGICDVQRIEPAERDRLIRVVFEAKSPKGSAKERGLVGYDELPGQGRHVRAEKAHPAFQLFRMVSVLANLRIREGREERPLTPDELEDLVDFINQVSLKQEVTWQDLADKLRIERADLRGTAKASFDGSPVLRNPPTDVTTEKIMACKVKWLKEWWKEADDEQRGYMVDAFSNSGGSEDGTDVNDEVAELLEQATEDDQLEFEKISLPQGRAAYSLDSLRRLTDRMLRDGVDLHTARRLEFNVGDDWKPAVEPIGAPTGNPAVDRVLKQVSRWLHAATERWGEPTVINIEHARDGLGSERVARELMRENEKRRKANASAVAEMAAKLKLSGKVHRSDQIRYFALQRQNCQCLYCGAPITYTTAEMDHIVPRADGSSTNDRSNLAAVCRTCNHMKGKIPFAVWASSDKANQGVSLTGALERVNMWQRDSGMSPRQLKQLQREVCARLKSKKPDQEFDGRSMESVAWMAVELRTRIEGFYRSRDEESVPSVGVYRGQLTAEARRASGFESRVNLIGGRGKTRFDRRHHAMDALVIALMNPSVSRTLALRLNMRDAQRLTGVEETWKHFYGKPGEASKRFESWRESMLRGVELFNIALSDNAIPFVENIRLRVGSSVIHDATVHSFCPPKTPDGKQIITKGYGEQHSLGSAMPVELIDRAETPALWTALTRCPDFDPKKGLPENPQRTISVNGTRVGPTELVNFFEFSKSGPKACLKVRGGYVDLSGAIHHARIYRIAGKKTAYAMIRVFQVDLLRLKDHDVFTTPLKPSTISMRTAEPKIREALANGTATQIGWLVEGDELVIDTSKYSGGFIGEVLARYPEATSWRVAGFMTPAKLRIKPILLSKEGFVDETQAALLGVEVTSEAIQKTVDRPGWLPAVNVLFGAGGVRVIRRNCLGEERYHSSASLPVSMTLE

SEQ ID NO: 277 - protein, 1103 aa, Actinomyces sp.
MTKINDDLRYRVGIDVGLKSIGFCAVEVDENDQPLRLLNSMVFVHDAGVDPNENKAAKSRKLTAGVARRTQRGTAQNRRRLAELDRALSEELNWPLPNLEDFEDSYEPWHTRAELVEHYIKDDAERAEALAIAIRHIARHRGWRNPYLSVDSLLTPQEPSKFLRGLNERVTQALGREFPADATPGQLICAYIDSPKYAETQGIRGDSGILSGKLHQFDNVGEIRKICEVQRLDHDVFKLLVRKVFFAKSPRGSAAGLVGHDQIPGQGKYIRAEKAHPDFQLFRIVAVLTNLRIREGKAERCLTPDELRGLVDYILEVQLKQQVTWADLADNLGIERTDLRGTARASFDGSPALRFPPTDVTAEKIMASKVKWLKDWWDKADSERRGFMVDALSNSGGSTGDNDIDDEVAALLEAATEDEQAELEKIQLPQGRAAYSLDSLRRLTKRMLEEGVDLHTARKEEFNVDDDWRPEPEPIEAPVGNPAVDRVLKQVARWLNMATDRWGVPDVINIEHTRDGLGSEKVARELLRESQKRQDLNQKDMDKMIRELGISGKARRSSLIKYQAIQRQNSMCLYCGTEIGFETAEMDHIVPRALSGSTNDRSNLAAVCRACNHQKGAVPFAVWATSGEAHAGVSLEDAIKRVRLWQKGPGMSPKQHKAFQNEVISRLKSRKPDEEFDGRSMESVAWMAVELRTRIDGYYRKVNSDSVPKVGIYRGQLTAEARKASGFENRVNLIGGKGKTRFDRRHHAMDALVIAMMNQSVSQTLALRVNMRESQRITGQEETWKNFYGKPGQASERFEKWREGMLRAVELFNIELAKNAIPFHENVRLRVGSSKVHDDTVRKFIHAKLGEALSVAMIDCAETPALWTALTRLPDFDPKDGLPEDLSREIYIHSRKITADEQLNFFNSPSACLKVRGGYVEIGSSIHHARVYRIDGKKTTYSMVRVFATDLVKMTHEDVFTTPLKPSTISMRTADPKIRKALADGTATQIGWLVEGDELQLETDKYSGGLIGEVLAEYPQLTSWRVAGFYGVTQLRLRPYMLAAEGIPSDASESLRKVIEGKGWLPAINALLSSGCVKVVRRNCLGEPRFNAKSSLPVSQLLR

SEQ ID NO: 278 - protein, 1114 aa, Actinomyces turicensis
MQFHFYMVYVTMKGMNDKDASQQLRYRVGIDVGTHSIGFCAVEVDESGMPIQLLNSMVHKHDSGIDPGGNDTATTRLAEAGVARRTRRLIRRRKKRLQELDAFIEECGWPLVDLATITDARSPWRIRAHLATEHIDDEAEQGKLLSIALRHMARHRGWRSPYARISSLHIQADPSEQLKALAQRVSEKTGISLTADQTPAQLISVYLDVFETGKLRGPEGILGGKLMQSDNANELRRIATVQGLDNDLLKKIIGFVFAAESPKGSAAKRVGKDVLPGAHGLRAEKAHPAFQQFRIVSIVQNLRIKEGTGLRALTSEETEIVVDFLNQAGLTEAPTWEEVADNLEIPRSHLKGTATEGFDGIAPSTRPPFDVTSQKILNGKLKKLSAWWKDADYDHRCAMVNALSNVGSDDEGSLADDDVREFLSDFTDEELEALDKVELPGGRAAYSVDSLEKLTNTMLSEGCDLHSARKIAFGVDDSWTPPAEPIGQPVGNPAVDRVLKQVARWISAATNQWGTPESVNIEHVRDALGSEKASREYQRSLQTRRIRNEKLFAEMRERLDIGGKPRRSELTRYLALQRQNCQCLYCGMPITYTDAEMDHIVPRKGAASTNTRENFAAVCRACNHQKSNLPFAVWAEKTERPGVSVKEAYKRVSDMRIEPGMNGRQMNEFRKAIRLRLTTKHADAEIDGRSLESVAWMANELRHRIEGFYRSAENDVTVRVFRGAVTAEGRRASGFESRVNLIGGKGKTRLDRRHHAMDALTIALMEPGIAQTIALRMNMRESQRVLGEQETWKSFTGGSDTARKRWEHWCEEMLRASELFNVFLAEDRIPICQNKRLRLGSSAVHKAIVQPFEASDKRIVSDAMPVELIDRASTPALWTALTRDPDFDPKEGLPANPSRTIRLHDKRLGPNETVEFFPTAAACLAIRGGYCEIGAGIHHARIFRISGKKTTYAMLRVYQCDLVRFQKENLLTVELPANTISVRTAVPKLREALAHGTAEQIGWLVVGDELKIDLSGFTTGQIETFNETYPQATRWEVTGFPTKTQLRLKPLLIASEGLADDVPDDIVKIVKGPGWWPAIDKLLKIGNVVLYRRDTHGKPRVVSHRSLPLSSKLQ

SEQ ID NO: 279 - protein, 1113 aa, Alcanivorax sp.
MRYRVGLDLGTASVGAAVFSMDEQGNPMELIWHYERLFSEPLVPDMGQLKPKKAARRLARQQRRQIDRRASRLRRIAIVSRRLGIAPGRNDSGVHGNDVPTLRAMAVNERIELGQLRAVLLRMGKKRGYGGTFKAVRKVGEAGEVASGASRLEEEMVALASVQNKDSVTVGEYLAARVEHGLPSKLKVAANNEYYAPEYALFRQYLGLPAIKGRPDCLPNMYALRHQIEHEFERIWATQSQFHDVMKDHGVKEEIRNAIFFQRPLKSPADKVGRCSLQTNLPRAPRAQIAAQNFRIEKQMADLRWGMGRRAEMLNDHQKAVIRELLNQQKELSFRKIYKELERAGCPGPEGKGLNMDRAALGGRDDLSGNTTLAAWRKLGLEDRWQELDEVTQIQVINFLADLGSPEQLDTDDWSCRFMGKNGRPRNFSDEFVAFMNELRMTDGFDRLSKMGFEGGRSSYSIKALKALTEWMIAPHWRETPETHRVDEEAAIRECYPESLATPAQGGRQSKLEPPPLTGNEVVDVALRQVRHTINMMIDDLGSVPAQIVVEMAREMKGGVTRRNDIEKQNKRFASERKKAAQSIEENGKTPTPARILRYQLWIEQGHQCPYCESNISLEQALSGAYTNFEHILPRTLTQIGRKRSELVLAHRECNDEKGNRTPYQAFGHDDRRWRIVEQRANALPKKSSRKTRLLLLKDFEGEALTDESIDEFADRQLHESSWLAKVTTQWLSSLGSDVYVSRGSLTAELRRRWGLDTVIPQVRFESGMPVVDEEGAEITPEEFEKFRLQWEGHRVTREMRTDRRPDKRIDHRHHLVDAIVTALTSRSLYQQYAKAWKVADEKQRHGRVDVKVELPMPILTIRDIALEAVRSVRISHKPDRYPDGRFFEATAYGIAQRLDERSGEKVDWLVSRKSLTDLAPEKKSIDVDKVRANISRIVGEAIRLHISNIFEKRVSKGMTPQQALREPIEFQGNILRKVRCFYSKADDCVRIEHSSRRGHHYKMLLNDGFAYMEVPCKEGILYGVPNLVRPSEAVGIKRAPESGDFIRFYKGDTVKNIKTGRVYTIKQILGDGGGKLILTPVTETKPADLLSAKWGRLKVGGRNIHLLRLCAE

SEQ ID NO: 280 - protein, 1146 aa, Alicyclobacillus hesperidum
MAYRLGLDIGITSVGWAVVALEKDESGLKPVRIQDLGVRIFDKAEDSKTGASLALPRREARSARRRTRRRRHRLWRVKRLLEQHGILSMEQIEALYAQRTSSPDVYALRVAGLDRCLIAEEIARVLIHIAHRRGFQSNRKSEIKDSDAGKLLKAVQENENLMQSKGYRTVAEMLVSEATKTDAEGKLVHGKKHGYVSNVRNKAGEYRHTVSRQAIVDEVRKIFAAQRALGNDVMSEELEDSYLKILCSQRNFDDGPGGDSPYGHGSVSPDGVRQSIYERMVGSCTFETGEKRAPRSSYSFERFQLLTKVVNLRIYRQQEDGGRYPCELTQTERARVIDCAYEQTKITYGKLRKLLDMKDTESFAGLTYGLNRSRNKTEDTVFVEMKFYHEVRKALQRAGVFIQDLSIETLDQIGWILSVWKSDDNRRKKLSTLGLSDNVIEELLPLNGSKFGHLSLKAIRKILPFLEDGYSYDVACELAGYQFQGKTEYVKQRLLPPLGEGEVTNPVVRRALSQAIKVVNAVIRKHGSPESIHIELARELSKNLDERRKIEKAQKENQKNNEQIKDEIREILGSAHVTGRDIVKYKLFKQQQEFCMYSGEKLDVTRLFEPGYAEVDHIIPYGISFDDSYDNKVLVKTEQNRQKGNRTPLEYLRDKPEQKAKFIALVESIPLSQKKKNHLLMDKRAIDLEQEGFRERNLSDTRYITRALMNHIQAWLLFDETASTRSKRVVCVNGAVTAYMRARWGLTKDRDAGDKHHAADAVVVACIGDSLIQRVTKYDKFKRNALADRNRYVQQVSKSEGITQYVDKETGEVFTWESFDERKFLPNEPLEPWPFFRDELLARLSDDPSKNIRAIGLLTYSETEQIDPIFVSRMPTRKVTGAAHKETIRSPRIVKVDDNKGTEIQVVVSKVALTELKLTKDGEIKDYFRPEDDPRLYNTLRERLVQFGGDAKAAFKEPVYKISKDGSVRTPVRKVKIQEKLTLGVPVHGGRGIAENGGMVRIDVFAKGGKYYFVPIYVADVLKRELPNRLATAHKPYSEWRVVDDSYQFKFSLYPNDAVMIKPSREVDITYKDRKEPVGCRIMYFVSANIASASISLRTHDNSGELEGLGIQGLEVFEKYVVGPLGDTHPVYKERRMPFRVERKMN

SEQ ID NO: 281 - protein, 1552 aa, Anaerophaga sp.
MFSQRNNPYCELLQNVKQLYKEKFGKTNQVDNSIIYGFMKRILGLDLGTNSIGWALVENDENDRKGKIIGMGSRIIPMDMSELDNFNKGASISKTAERTRLRMTRRLRERHLLRRARLHRILNIMGFLPEHYRNSIDFIDKKGCFFEGQEPKIAYKPDKNSEQFCFLFTSSFHEMLEDFRKFQPELIQNRKKVPYDWTIYYLRKKALTQKISKEELAWIILNFNTKRGYYHLRGEDEDNQDNKKIKEFRALKVVNVTEREGANSSGKKWYDMELENGWVYSRQSNLPPNLEGKTIELIVSYTLDNNGNIKKDKNGKEKYSLSMPGEEDWNLVKIKTENDLKTSKKSVGEYIYDHLLKNPDQKIRGKLISTIERKFYKEELSRILKTQMNFYEELKNRELYQKCVEELYPNNKSHQQTLLQKDFIHLIVEDIIFYQRPLKSKRAFVNNCPLEYRVYVDKKSGELIKSGVKCIPKSHPLFQEFRLWQYVRNLRIYERERMVNGRLMVNVDVTNELLPDEEHIVRLFDLLNDRKSFKQDDVLRFVGIKSPKDRKRYSWNYPEDKELPGNETRHLILAWLKKVDGVPEDWLDPEKLKALWHLLYSVTDREEIIKGLHSFAKKYELPDTFVEHFKKIPRLEREYGSFSEKAIKKLLPLMRMGKYWKAEEIPADLLEKAQKIIDAEADDRISDEVREKLLHLKDISQLKGLPLWQASYLVYGRHSETGEVVKWRTSEDLEKYILQFKQHSLRNPVVEQVILEALRVVKDIWEHYGEGKEGFFNEIHVEIGRELKNPADKRKKITSQIQENENTNLRIKALLEELFNDPSVKNVRPYSPAQQEILRIYEDGVLNGQKEIPDDILKISKMARPSKSQLVKYKLWLEQKYRSPYTGEIIPLSQLFTSAYEIEHIIPQARYFDDSFSNKVICEAEVNREKGHQLAFEFITKRGGDEIELNFGKKVTILNVEEYQKFVKDHYGRSLRSLSKMRKLLMEDIPDDFIDRQLNDSRYISKVVRNLLSNIVRAEDENSLVSKHLITCTGGVTTRLKHEWGLNDVWNELITPRFVRLNKMGKEKFGEWINKKGKQVFQIQMPLELQKGFNKKRIDHRHHALDALVVACASRSHVNYLNNDSARANASETRYDLRNKLCYKDKTDSNGNYRWKFYKPWESFTEEAKNRLAGTVVSFKSNRRIMTRSSNRYFKWVDTSEGKKKKLVRQIKGDNQAIRKPLHKDTVLGKVSLRKEKKVSLSKAIDLWESIVDKPLKKRIQSLREQGYDKKLLLKYFKDRNNQFNGQDISRVNIYFFDNNLAARRVTLDASFNSEKRIDGITDSGIKKILYAHLQNEKYHGKKDEKGNEISPYELAFSPEGLEEMNANIKKLNGGKPHCPIYKVRLAETIGEKFKLGEKGNKNKKYVEAAKGTNLFFAVYVDEKGVRSFETIPFSVALERRKQKLAVVPEENENKEKLLFYLSPNDLVYVPDEDEKLIDYRQLSINPTRIYKMVSSSGTQCFFIPHFVASPIVQTMELGPNNKSERAWDGQMIKNVCYKLSVDRLGNVKIEK

SEQ ID NO: 282 - protein, 1515 aa, Anaerophaga thermohalophila
MKRILGLDLGTNSIGWALVESDEEQKSGKIQGIGSRIIPMDQNELDNFNKGNTVSQTAERTRLRMVRRLRERHLLRRERLHRVLKEIGFLPEHYLEQIDFTEKPGGFLPGKEPKIAYKPDNFKDKYDFLFQDSYHEMLSDFQDKNPEFIQKRKKVPQDWTIYYLRKKALTAKITKEELAWIILNFNQKRGYYQLRGEDEDVAKNTKKEEFHALKVVKVKEREDSEGASGKWYDIELENGWVYPRQSNIRPDWEGKILELIVTYNLDKDGNIKTDKEGNEKRSFRMPNKDDWTLRKKRTENEIEKSGKTVGEYIYDNLLDAPDLKIRGKLVSTIERKYYRSELEQILTAQKKYHPELSNSELFNKCISNLYPNNDIHRKALLSKDFVHLIINDIIFYQRPLKSKRSTVSNCPLEYRVYVDKVTGEKKKVPLKCIPKSHPLYQEFRLWQYVKNLRLFEKERFENGRLLTNVDVTEQFLPDEDKYVELFEFLNGRKTFKQDDILKFAGIKSAKDRVKYYWNYPQEKEYPGNETRYLIESRLKKIENVPDEWLNYEKIEELWHLLYSVTDKVEIEKGLQSFAAKYQLPDLFVEVFKGFPRMEREYGAFSKKAIKKLLPLMRMGKYWKLENINPDLIEKVQKIIDGEADDNINDGIRERFSEINEMSDLRGMPLWKASYLVYGRHSEAAEVIRWRTSADLDQYIKDFKQHALRNPIVEQVVLEALRVVKDVWNYFGEGREKFFDEIHVEIGRDLKNPADKRQKIANQIQENENTNLRIKALLVELFNDPEVQNVRPYSPVQQQLLKIYEDGVLNAERDIPDDIQKISRMANPTRNQLIRYKLWLEQKYRSPYTGEIIPLNKLFTSEYEVEHIIPRARYFDDSFSNKIISEAEVNRKKDRMLAFEFIKKLGGSTIDLNYGKKVSVLTVEEYQQFVKDHYGINPHSRLKMQKLLMDEIPESFIERQLNDSRYISKMVRNLLSNIVREENENSPVAKQLITCSGSITNTLKQEWGLNDVWNTIITPRFERLNKMGEQKYGEWVNKEGKPVFQIQMPLELQKGFNKKRIDHRHHALDALIVASATRSHVNYLSNEAAKTNAKDTRFDLRNRLCYKEKRGQNRNFTWRFYKPWNTFTEDAKNALNDIVVSFKSNHRVINKSTNRYFKWENLPGGMKKKRLVRQEKGDNWAIRQSLHKDTVLGKVSLRKVKPVSLSVALDSWNNIVDKALKKKIRSLKDQGYDKKLMLKYFKDRRNEYNGENISRVNVYYFDEEMAARRVDLDTSFNSEKRIEGITDSGIKKIIYAHLKNEKYHGQKDDKGKDISPYELAFSPEGIAEMNANIKQLNGGKPHCPIYKVRLAEPVGEKFQLGETGNKTEKLVEVAKGTNLFFGVYANDEGVRSFATVPFYLAVEREKQGLPAVPQENENGDQLLFWLSPNDLVYVPSEEDAHFANPKQIELDNSRIYKMVSSTGTQCFFIPHFVATPIVQTIELGPNNKSERAWDGQMIKKVCYKLSVDRLGNVEIE

SEQ ID NO: 283 - protein, 333 aa, Bacillus cereus
MMNPNNFTKEDFWRTIILYGLNQATYKIALGQSLIRFSEQQRNVVSMNELAEDFFDMYLERLKNGKPQLATPNRQTAMERIINSYNIGRLTRSQAIEKVEREAFNDVIDRFHTVDSLQVPMKFYEKTDKGIVIFDNVFEIFSDNNNFELRNELDARWDLLESAFEIKRTDSQLVNDIRKLYLANGYERTDITKNRSVLNGYQSNVCFYCGELMSDDDVHVDHVIPRQLINHDDIWNLVLSHGFCNQQKSDNLPDVNYIEKLIERNEYFIKSNHPISNKLKERLGNTPRRRRTTIDRIYEHAKLVLAPWKGIYGYNPATDPFYKTFIRNIVLSK

SEQ ID NO: 284 - protein, 1068 aa, Bacillus cereus
MRYVLGLDIGIASCGWAVINQEKERIEDLGVRIFDKAENPKDGKSLAAPRRDARSTRRTLRRKKHRMQRIKILLVKQGLLFKTELNHLYESATEFDVWNLRLDALERKLHPKEFARVLIHLAKRRGFKSNRKETTLSENGQILESISENQQIMEQQNYRTVGEMILKDKKFENHKRNKDGTYIGTVTRQQLQDEIQMIFHTQRLYKNDYATEEFESSYLEIWASQRPYASKDQIEKMIGYCTLEPKEKRTPKASWSFQYFVALQTINNLRLISKDKIEELSFEEKKQIMNLALEKPIVKYIDIRKLLSIPNDFQFNSLSYSADTVDTTLENKRCIELKEYHSINKVYKQVYGKNTPNLLPIDYDTIAYGLTIFKDDKDILEYLQNKYVNAKGKPIKNLAKKTYDDTFIQALLNLNFTKMGHLSFKALKNIIPFLEEGLSYDKACEKAGYNFKGTSYTERTKYLPVIPQNTNPVVHRALSQTRKVINAIIKKYGSPNAIHIETARELSKTFQERKEIDSRYQDNSKKNEHAIHKLKELGNINPSGINIVKFKLWSEQDGRCMYSGKYIEPHRLFEEGYTEVDHILPYSRSLDDSYNNKILTLGTENQRKGNKTPYEYMGNTSIWDEFETRVQSNKKINFKKQQKLLLQNFSYAREQEFIERNLNDTRYATIYLTSLIQQHLIFSESSSKKKVRTVSGIITSHLRSRWGFNKDRKEGHIHHALDAVIVAVTSNHMIQRVTKYYKLKELNKNLQAKQLPFPEPWEGFRLELEARISPNTQQYLKGIHFKNYADVNLSDIKPIFVSRMPKRSITGELHQETIRKFLGYNEKGKVLTAIKTKLEDIPFDANGDFPMYGKETDLYTYNAIKERYLSHEKDKRKSFQEPLYKPTKSGEIGPLIKSIKIMDTRTIVNPVNQGKGVVYNSKIARTDVFKKEDKYYLIPIYTIDLLKNILPHKAITAGKGYEDWTTIDSSFTFLFSLFPNDLIQIVPSKNKTIKARTTVSKKEILLPSLTGYFKGVHSGTAGITVETHDGSVIANVGSKQLLLFEKYQVDVLGHYTKIKEEKRMGMAI

SEQ ID NO: 285 - protein, 1078 aa, Bacillus cereus
MRYVLGLDIGIASCGWAVINQEKERIEDLGVRIFDKAENPKDGKSLAAPRRDARSTRRTLRRKKHRMQRIKVLLVKHGLLSKTELDHLYESATEVDVWNLRLDALERKLYPKEFARILIHLAKRRGFKSNRKETTLSENGQILESISENQQIMEKQNYRTVGEMILKDKKFENHKRNKNGTYVGTVTRQQLQDEIQMIFHAQRLYKNDYATEEFESSYLEIWASQRPYASKDQIEKMIGYCTLEPKEKRAPKASWSFQYFVALQTINNLRLISKDRIEELSFEEKKQIMNLALEKSIVKYIDIRKLLSVPNEFQFNSLSYSADTVDTAVESRKCIELKEYHSINKVYKQIYGENALNLLPKYYDTIAYGLTIFKDDKDILEYLQNKYVNAKGKPISNFANKTYDDTFIQALLNLNFTKMGHLSFKALKNIIPFLEEGLSYDKACEKAGYNFKGTSYTEQTKYLPVIPQNTNPVVHRALSQTRKVINAIIKKYGSPNAIHIETARELSKTFQERKEIDSMYQDNSKKNEHAIHKLKELGNINPSGINIVKFKLWNEQDGRCMYSGKYIEPHRLFEEGYTEVDHILPYSRSLDDSYNNKTLTLGTENQRKGNKIPYEYMGNTSIWNDFETRVQSNKKINKKKQQKLLLQHFSYAREQEFIERNLNDTRYATIYLSSLIQQHLIFSESSRKKKVHTVSGIITSHLRSRWGFNKDRKEGHIHHALDAVIVAVTSDHMIQRVTKYYKLKELNRNLQAKRMPFPEPWEGFRLELEARISPNTQQYLKGLRFKNYADVNLSEIKSIFVSRMPKHSITGELHQETIRKFIGYNEKGKVLTAIKTKLEDIPFDANGDFPMYGKESDLYTYNAIKERYLSHKKDKRKSFQEPLYKPTKSGGIGPLIKSIKIMDTRTIVNPVNQGKGVVYNSKIARTDVFKKEEKYYLIPIYTIDLMKNILPQKAITAGKGYEDWTTIDPSFTFLFSLFPNDLIQIVPSKNKTIKARTTVSKKEVLLPSLTGYFKGVHSGTAGITVETHDGSVIANVGSKQLLLIEKYQVDVLGNYTKIKEEKRIGLTTYNDNKKIAAC

SEQ ID NO: 286 - protein, 1088 aa, Bacillus smithii
MNYKMGLDIGIASVGWAVINLDLKRIEDLGVRIFDKAEHPQNGESLALPRRIARSARRRLRRRKHRLERIRRLLVSENVLTKEEMNLLFKQKKQIDVWQLRVDALERKLNNDELARVLLHLAKRRGFKSNRKSERNSKESSEFLKNIEENQSILAQYRSVGEMIVKDSKFAYHKRNKLDSYSNMIARDDLEREIKLIFEKQREFNNPVCTERLEEKYLNIWSSQRPFASKEDIEKKVGFCTFEPKEKRAPKATYTFQSFIVWEHINKLRLVSPDETRALTEIERNLLYKQAFSKNKMTYYDIRKLLNLSDDIHFKGLLYDPKSSLKQIENIRFLELDSYHKIRKCIENVYGKDGIRMFNETDIDTFGYALTIFKDDEDIVAYLQNEYITKNGKRVSNLANKVYDKSLIDELLNLSFSKFAHLSMKAIRNILPYMEQGEIYSKACELAGYNFTGPKKKEKALLLPVIPNIANPVVMRALTQSRKVVNAIIKKYGSPVSIHIELARDLSHSFDERKKIQKDQTENRKKNETAIKQLIEYELTKNPTGLDIVKFKLWSEQQGRCMYSLKPIELERLLEPGYVEVDHILPYSRSLDDSYANKVLVLTKENREKGNHTPVEYLGLGSERWKKFEKFVLANKQFSKKKKQNLLRLRYEETEEKEFKERNLNDTRYISKFFANFIKEHLKFADGDGGQKVYTINGKITAHLRSRWDFNKNREESDLHHAVDAVIVACATQGMIKKITEFYKAREQNKESAKKKEPIFPQPWPHFADELKARLSKFPQESIEAFALGNYDRKKLESLRPVFVSRMPKRSVTGAAHQETLRRCVGIDEQSGKIQTAVKTKLSDIKLDKDGHFPMYQKESDPRTYEAIRQRLLEHNNDPKKAFQEPLYKPKKNGEPGPVIRTVKIIDTKNKVVHLDGSKTVAYNSNIVRTDVFEKDGKYYCVPVYTMDIMKGTLPNKAIEANKPYSEWKEMTEEYTFQFSLFPNDLVRIVLPREKTIKTSTNEEIIIKDIFAYYKTIDSATGGLELISHDRNFSLRGVGSKTLKRFEKYQVDVLGNIHKVKGEKRVGLAAPTNQKKGKTVDSLQSVSD

SEQ ID NO: 287 - protein, 1069 aa, Bacillus thuringiensis
MNYDIGLRIGITSCGWSIINKDLERIEDLGVRVFEKAENPDGTASAAPRREARKSRRKHRRKKHRIERIKRLIVQHDLLSKKELDSLYLSPFNIDVWNLRVEALERKLDNREFARVLIHLVQRRGFQTIRKSVEIQEEGKLLENVSENERIMKVNGYKTVGEMFSKHEKFTHHKRNKDGSYTSVVTRSLLLKEIKTIFNSQRILGNVFSTQKLESDYLYIWGSQRPTLTYEQLMSMVGNCIYEKKEKRAPKTSWAFQYFSLLQKINKLKVSDDNTLRKLSKEERDIVIELAFKKKNVSFVDIRKALKLNDNTKFNHLTYSHVVETKKVEKATFIELKGYHLIKKQLKDRNVELTQELQPKDYDAIAAASTFFKNDIEFRDYLRNQYLDSNGKRKSNIANKVFEDKVIAAVFELNFSKVCHLSFKSLYKLIPHLEKGLDYKEAILCAGYNFRDENKRDKKLFLPVIQQETNPVVHRALTQARKVINAIIREYGSPNTIRFVVANDLAKTYKQRKELESTLKKNRAENEKIKTKLLSMGIINPTGMDIVKYKLWYEQSGICLYTGRQMELSSLFKPGYSIVNHIIPYNRSFDDTYHNRVLTLTETKYEKGNKIPFEYFGAEETCWNEYEKRVSTSKKIHDKKREKLLIRNFDIEYENEMISNNVFDTHYIGSYFEKYIDEHLQFKKSTKKQKVFSIHGNMVAHLHSRWGFNKNSREIYLNHAVDAAIVAVLTDQLIRNIADYYRRDNILEQKGSLKFPEPWKSFSIELEARISPQVRDLIKKLNLDSYLDVDILHIKPVFISKKPRRKVNGEAHKSTIRSLIGINEIGKTVTCIKTRLEDIPFDENGDFPMYGKDTDKYTYTAIKERYLEFNKDKEKAFSTPLYKLKRNGEPGNQIKSVKIIDTRNIVNKVNQGKGIAYNSNIIRVDVFSRDQKYYVVPIYLRDFIKGSLPNKIITAAKGFMQWPETDNSYTFLFSIFPNDLIKVVPKEGKFIKAKNENKENINLTEILGYFKGLDSSTGAFTLESHDGSLLARGIGTKNLLLIEKYQVDVLGRYNKVGNEERQDIKIQQN

SEQ ID NO: 288 - protein, 206 aa, Bacteroides cellulosilyticus
MKKILGLDLGCNSIGWALVNEAENTEEISSIIKLGVRVNPLTVDEMQNFEKGKSITTNADRTLKRSMRRNLQRYKLRRDTLIEVLKEHGFITDSTLLSEHGNKTTFETYRLRAKAAVEEISLEKFARVLLMINKKRGYKSSRKAKGSEDGVLIDGMDVARKLYEEGLTPGELCLQILEAGKKNLPDFYRSDLQNEFDRIWNFQKLV

SEQ ID NO: 289 - protein, 349 aa, Bacteroides coprosuis
MKKILGLDIGTNSVGWAVVNTNQEGEPSQIEKLGSRIIPMSQDILDKFGQGQTVSSTASRTDYRGIRRLRERSLLRRERLHRVLHILDFLPKHYADSIGWDPRNSKTYGKFLPGTEVKLAWVPTADGHQFLFYSTYLEMLEDLKQTQAQLFETSQTPVPLDWTIYYLRKKALTQPITKHELAWLLLHFNTKRGYYQRRGELEDTPTDKLVEYHALKVVDVEVDPEDQSKKPWYFVHLENGWIYKRQSSEPLDNWKGLVKEFIVTTHLDKEGKPKLDKEGEVRRSFSSPKEDDWTLVKKKTENDLEKSGLTVGAYIYQTLLNKPNQKIRGGLIKHIERNYYVEELEQILR

SEQ ID NO: 290 - protein, 1504 aa, Bacteroides coprosuis
MKKVLGLDIGTNSVGWAVVNQNDKGEFLSIEKIGSRIIPMSQDVMDKFGAGQTESSTAQRTQYRGVRRLRERSLLRRERLHRVLHILHFLPQHYDAAIGWNKKENKTYGKFLPGVEVNIPWVATDQGHQFIFMDSYAEMLKDLKQHQPHLFEKSSTPVPLDWTIYYLRKKALTQAISKEELAWILLNFNQKRGYYQLRGEEVEDNTKREEFYALKVVKVELDKDNTSAKTWYKVHLENGFIYPCPSDTPIDSWVGMVKDFIVTTTLEKDGSEKRTADGEIKRSFRAPKEDDWTLLKKKTESELEKSGKQVGAFIYDTLLSNPDQKIIGGLIKTIERKYYKKELEQILETQQKFIAELSDKKLFQACAEELYPLNDSHRENLLERDFKHLFVQDIIFYHRPLKTKKSLISNCTYEYRTFYKNGEKQISPIKCIAKSNPLFQEFRVWQFVQNLRILQRQRSEGDSIKYNVDVTAEFLKDENDIANLFTWLNERKVIKQDQLLKSYFKLKVNKETKELDYRWNYVDDKNKEYPCNATRTHILSFLEKCKEEKRIEDDRFVYSLWHLLYSVVEPIELRGALAKFAEREHLHPSFVDVFAQFPPLEKEYGSYSEKAIKRLLPLMRMGDYWHEDKIDVKTKQRIQRIIDGEADDDITHRSREKVENLRSITDFKGLPLWKAGYVVYNRHSESGELTKWKTPHELSNYIQNEFKQYSLRNPIVEQIVLETLRVVHDLWVKHGDFSEIHLELGRDIKNSSDKRKRMAERQQENENSRQRVLEMLIDLKKEAAFADLNPYSPSQQEKLRIVEDGVLRSNIEIPKDIEKITKSAKPTSRELTKYRLWLDQKYRSPYTGQPISLAQLFTSKYEIEHVIPQAKYFDDSFTNKVICESEVNKEKGSMLAHEFILKNGGSTVNVGGRQVQVLKNDAYVELINRLYGKNNPVKAKKLLAEDIDEVVGDFSERQLNDTRYISRVVQKLLSNIVREEDEQESTSKHVIGCSGQVTTALKKDWGLNDIWNKIIQPRFERLNEMTATEDYGVWQSPNHFQIRVPEEIQKGFTKKRIDHRHHAMDALVIACATRSHINYISNRSGQDRNAKFETTRTDLRSKLCYKENSSGNNYNYIFNKPWDTFTQDAHRALENIVVSHKQNLRVLTKTNNYTQFINKDGKKDLQKQVKGDHFAVRKPMHQETIYGRVSIRSIKEVALKKALENWKQIVDRTLKDKIRELIGAYGKYDAQTILKYFKDRDYKFNNLKINRVEVYEYDHNCAAVRKSIGDDLTIKQIERITDESIRKILMNHLSNYDDNLKEAFSPEGLMEMNKNIKELNGGKNHQPIYKVRLFEDLGSKFPLGVSHNNPDKYAIAAKGTNLFFGIYEDQEGKRMFDSIPLNIVIDRLKEKKSPVPETYNESKLKFHLSPNDLVYVPTDEEQKQPELVDVDHLSDEQKGRVYKAVSFTGNRAFFVNHRVSKVIHDYVEFGTKNKIENDDDKRSLKHICWKLKVNRLGEITDVKR

SEQ ID NO: 291 - protein, 1509 aa, Bacteroides eggerthii
MKTILGLDLGTNSVGWAVINSVIKEQAERIWIEMAGSRIIPMDAAVLGDFDKGNSISQTSERTRLRGARRLRERQLLRRERLHKVLNILGFLPNHYLEYIDFEKHPGKFLADAEPKLAWVKDEQGKYTFLFQAAFDEMLADFAIHQPSLVSGDKKIPYDWTIYYLRKKALTEMISKEELAWILLNFNQKRGYYQLRGEEEEDNAGKSVEFYALKVLTVEATDEKKGRDVWYNVHLENGWIYRRSSSVPLDWEGQVKEFIVTTDLNPDGTPKLDKYGEVKRSFRAPKEDDWMLIKKRTEADIANTHKTVGAYIYDTLLQKPQQKIIGKLVKTVERKLYRDELSLILQKQCAFHAELQDRALYARCVEALYPSNEVRRKNIANRDFVYLLMDDILFYQRPLKTKKSLIANCPYEENEYVDRETGEIKKTPLKCIAKSHPLFQEFRLWNFLSNIRIYQKEKEINGTLHLDVDVTAEFLKTEDDYVALFDWLNSRKEIEQKTFLKYPKFGLKKEISNYRWNYVEDKQYPCNETRHAILSSLEKANVCIDFLSNEKEVALWHILYSVSDKQEIEKALRTFAAKNGLDESFVEAFKKFPPFKSEYGAYSAKAIKKMLPLMRCGKYWDVSSIDDTTKERIKKIVTGEYDERISVKVRDKVMNLSDISCFRRLPLWLACYIVYNRHSEDKEAVKWESPADIDAYLASFKQHSLRNPIVEQVITETLRVVRDIWKQVGRIDEIHIELGREMKNPADKRKRMTAQILENENANLRIKALLAEFMNPEYEIENVRPYSPSQQEILRIYEDTVLHAEDQLPEEIDAILKKFNSSKVPTKSEFLRYKLWLEQKYRSPYTGELIPLGKLFTAAYEIEHVIPQSRYFDDSFSNKVICESAVNKLKDNQLGYEFIKNHHGQKVEVGFGKSVEIFSVDSYERFVKEQYAKSAVKMKKLLMDDIPEQFIERQLNDSRYISKVIKGLLSNIVREKNDSGEYEPEAVSKNIVVCTGSVTDRLKRDWGMNDVWNSIVYPRFERLNSLTDTQSFGHWENKSGKKVFQTELPLEYQKGFSKKRIDHRHHAMDAIVIACATRNHVNYLSNESASRNAKISRYDLQRLLCDKNRTDDNGNYKWVIKKPWDTFTQDAREVLSKIVVSLKQNLRIINKTTNVYRHLDATGNRVYEKQKTGDSWAIRKPMHKDTVFGAVNLRKVKVVRLSVALDTPAMIVDKRVKNKVFELLSYKYDKKRIEKYFKENAFLWKELDLAKVAVYYFTEATTEPLVAVRKPLDSTFNEKKIKESVTDTGIQKILLNHLCTKEGKPDLAFSAEGIEEMNRNLLQLNNGKSHQPIYKVRVYEPRGNKFSVGVLGNKGTKWVEAAKGTNLFFAIYITEDGKRTYETIPLNVVIEREKQGLVPVPDRNKKGDKLLFWLSPNDLVYLPTEEEREFGRINEPIDRGRIYKMVSCTGNEGHFIPANVANPIVPVIELGSNNKAQRAWTNEMIKDICIPIKVDRLGHIIEVKYRIDE

SEQ ID NO: 292 - protein, 1526 aa, Bacteroides faecis
MKKILGLDLGTNSIGWAVLNAADDNSLKYIEAAGSRIIPMDAAILGDFDRGNSISQTAERTRIRGMRHLRERYLLRRARLHRILNLLGFLPFHYAQDIDRYGNFSADMEPKIAWCKNLEGELEFIFIESFNEMLEDFRKNQPELVADNKKVPYDWVIYYLRKKALEKKISKEELAWILLNFNQKRGYYQLRGEDDDESMKTAKTRQYFDKQIIKNIIDTNQTYKGQRILIVELQNGDKGKIFKKEIPDWIGQEKNIIVTVDIDKDGNDKYEESGSLSCRFKIPTDAEWESEWKLIKMKTQKDLDESNKTVGTYIYDSILQNPTQKVRGKLVRTIERKYYKAELKQILEKQTEFHSELQDKDLYIECLNELYSNNDTHRNAITDRDFVYLFMNDILFYQRPLKSKKSLIDNCPYERNIYIDKETGEIKYSPIKCIAKSHPLFQEFRLWKFISSIRIYQRESVVEVVDKQLDLFSSQSTSVQKLVTDVDVTDKFLTCENDYVALFEWLNKKKIIDQKEFLKYRPFGLKGDIDNYRWNYVEDKSYPCNETHAMILTYFAKAGISEDILTKEMEEALWHILYSVEDRQEITKALRTFASKYHLSDSFVKVFSNIPPFKKEYGSYSAKAIKKLLSLMRMGKYWSEDAIDVNTRERIDKIVTGEYDEKIRDRVREKTIRLNDIRHFRALPDWLACYVVYDRHSETREITEWKSPEEIDEYIRNFKQHSLRNPIVEQVITETLRTVRDIWKQVGCIDEIHVELGREMKNPADKRKRITSQIIENENANLRVKALLTEFVNSEFEIENVRPYSLSQQDILRIYEDGVLNSVAEVPGDIAGILKKFNENDAKKRPTTSEILRYKLWLEQKYRSPYTGEMIPLSKLFTSAYEIEHVIPQSRYFDDSFSNKVICEAEVNKLKDNALGYEFIKKHHGEKVELGFGKIVEIFSVSVYEQFVKDNYSRNRGKMKKLLMDEIPEQFIERQLNDSRYISKVVKTLLSNVVREKAEQEAVSKNVIVCTGGVTDRLKKDWGINDVWNKIVLPRFLRLNELTNSTNFTAKNAAGNEIPAMPLELQKGFNKKRIDHRHHAMDAIVIACANRNIVNYLNNESASRKAKISRHDLQAILCDKVRTDDKGNYQWRVKKPWDTFTQDVYVALENIIVSFKQNLRVINKTSNYYWHYENGKKVLVKQVKGDSWAIRKPMHKDTVFGEVNLRKVKSVSLNEALKNPQFIVEKDLKRQLLSLLQQNFDIKKIKKYFEEHKDIWSDISLSKMNIYYFTKETKDRYFATRKPLDASFDKKKIESCITDTGIQQILLRHLELKENDPERAFSPDGIDEMNRNIIQLNKGKGHHPIAKVRVYEKADKFEVGQRGNKSSKFVEAAKGTNLFFAVYETEYPDEKTNSIVRKRNYATIPLNIAIERQKRGLSTAPEDEKGNVPSFVLSPNDLVYLPTSEDIVNGHITQPIDKSRIYKMVSSSGSQCFFIKHNIANIIVDKYEFSPLNKMERAISNEMIKEICIPVKVDRLGNIVKLGKSE

SEQ ID NO: 293 - protein, 1509 aa, Bacteroides fluxus
MKTILGLDLGTNSVGWAVINSVIKEQAERIWIEMAGSRIIPMDAAVLGDFDKGNSISQTSERTRLRGVRRLRERQLLRRERLHKVLNILGFLPNHYLEYIDFEKHPGKFLSDAEPKLPWVKDEQGKYTFLFQAAFDEMLADFAIHQPSLVSGDKKIPYDWTIYYLRKKALTEMISKEELAWILLNFNQKRGYYQLRGEEEEDNAGKSVEFYALKVLTVEATDEKKGRDVWYNVHLENGWIYRRSSSVPLDWEGQIKEFIVTTDLNPDSTPKLDKYGEVKRSFRAPKEDDWMLIKKRTEADIANTHKTVGAYIYDTLLQKPQQKIIGKLVKTVERKLYRDELSLILQKQCAFHAELQDRTLYARCVEALYPNNEVQRRNIANRDFVYLLMDDVLFYQRPLKTKKSLIANCPYEENEYVDRETGEIKKAPLKCIAKSHPLFQEFRLWNFLSNIRIYQKEKEINGTLHLDVDVTAEFLKTEDDYVALFDWLNSRKEIEQKTFLKYPKFGLKKEISNYRWNYVEDKQYPCNETRHAILSRLEKANVCIDFLSNEKEVALWHILYSVSDKQEIEKALRTFAAKNGLDESFVEAFKKFPPFKSEYGAYSAKAIKKLLPLMRCGKYWDVSSIDDTTKERIKKIVAGEYDERIAVKVRDKVMNLSDISCFKRLPLWLACYIVYNRHSEDKEAVKWESPADIDAYLASFKQHSLRNPIVEQVITETLRVVRDIWKQVGRIDEIHIELGREMKNPADKRKRMTAQILENENANLRIKALLAEFMNPEYEIENVRPYSPSQQEILRIYEDMVLHAEDQLPEEIDAILKKFNSSKVPTKSEFLRYKLWLEQKYRSPYTGELIPLGKLFTAAYEIEHVIPQSRYFDDSFSNKVICESAVNKLKDNQLGYEFIKNHHGQKVEVGFGKSVEIFSVDSYERFVKEQYAKSAVKMKKMLMDDIPEQFIERQLNDSRYISKVIKGLLSNIVREKNDSGEYEPEAVSKNIVVCTGSVTDRLKRDWGMNDVWNSIVYPRFERLNSLTDTQSFGHWENKSGKKVFQTELPLEYQKGFSKKRIDHRHHAMDAIVIACATRNHVNYLSNESASRNAKISRYDLQRLLCDKSRTDDNGNYKWVIKKPWDTFTQDAREVLSKIVVSLKQNLRIINKTTNVYRHLDATGNRVYEKQKTGDSWAIRKPMHKDTVFGAVNLRKVKVVRLSVALDAPTMIVDKRVKNKVFELLSYKYDKKRIEKYFKENAVLWKELDLARVAVYYFTEATTEPLVAVRKPLDSTFNEKKIKESVTDTGIQKILLNHLCTKEGKPDLAFSAEGIEEMNRNLLQLNNGKRHQPIYKVRVYEPRGNKFSVGVLGNKGTKWVEAAKGTNLFFAIYITEDGKRTYETIPLNMVIEREKQGLAPVPDKNEKGDKLLFWLSPNDLVYLPTEEELEFGRINEPIDRGRIYKMVSSSGNQCFFIPQSISNAIIPTKELGANNKAERSWDGAMIKNICIPVKVDRLGRIIEVKYRINE

SEQ ID NO: 294 - protein, 1436 aa, Bacteroides fragilis; identical to SEQ ID NO: 160

SEQ ID NO: 295 - protein, 1512 aa, Bacteroides nordii
MKNILGLDLGTNSIGWAVINSEEDGPIVKKRIELAGSRIIPMDAAVLGNFDSGVTKSQTAERTSFRSIRRLRERQLLRRERLHKVLQILGFLPEHYVNDIDFENHPGKIKRNTEPKLPWRKNSMGQFEFIFQDSFEAMLTDFATHQPVFVSEGKKVPYDWTLYYLRKKALTEGISKEELAWLILNFNQKRGYYQLRGEEEEEQSNKLVEFYALRVVKVEATDDKKGKDTWYNVHLENGWIYRRTSNIPLDWEGKVKEFIVTTDLNEDGTPKLDKYGEVKRSFRAPKEDDWTLIKKKTESDIANSHKTVGCYIYDALLQNPHQKIKGRLVRTVERKFYKEELRLILEKQLSFHPELQDRDLYRACIDALYVSNEAHKNNISGRDFVYLFIDDIIFYQRPLKTKKSLIDNCPYEENQYMDRETGEVKQAPIKCIAKSHPLFQEFRLWQFISNIRIYQRERVLDDGKLETDVDVTPDFLKTEDDYTTLFEWFNDRKEVDQKAFLKNPQFGLKKTFTEYRWNYVEDKSYPCNETRNAILNGLQKAGVSADFLSREVEEALWHILYSVEDKIEIESALRKFASKHDLDDRFADVFKKLPPFKKEYGAYSAKAIKKLLPLMRIGKYWELSNIDDKTKERIDKIITGEWDENIHDRVREKAIKLSDITDFKGLPLWLSCYVVYNRHSEARAIAKWESPEDIDSYLRLFRQHSLRNPIVEQVITETLRTVRDIWKRVGQIDEIHVELGREIKNPADKRAKMTAQIVENENTNLRIKALLAEFINSEYEIENVRPYSSNQQEKLKIYEDTVLNGVKEIPEDINTILKKFRESDLKKRPTKSDFLHYKLWLEQKYCSPYTGRIIPLGKLFTSAYEIEHIIPQAHYFDDSFSNKVICEAEVNGLKDKKLGYEFIKHNPGKMVEIGFGKPPVRIFSVEEYERFVKENYSGIKNKMNKLLMDDIPETFIERQLNDSRYISKVVKSLLSNIVREKDSNGEYEPEAISKNVIVCTGSVTDRLKRDWGVNDVWNSIIYPRFERLNELTGSQQFGCWENKEGKRVFQTAVPLEMQKGFSKKRIDHRHHAMDAIVIACATRNHINYLSNESASKKAKISRTDLQRLLCTKCRTDDNGNYKWIVKKPWPAFTQDIRKALENITVSFKQNLRVINKTTNYYVHFDESGKKVLEKQINGDSWAIRKPMHKDTVFGKVNLQKVKEVRLSLALDTPKMIVDKKLKEKVLQLYSYKYDKKRIDKYFKENASLWKDLNLSKVAVYYFTNDSTEPLVAVRKPLDTSFNAKKIKESVTDTGIQKILLNHLSNNQDDPNLAFSPDGIDKMNKNLTALNDGKYHQPIYKVRVCEPQGNKFSVGTSGNKTSKYVEAAKGTNLFFAVYQTEDGKRSYETIPLNVVIEREKLGWTPVPENNNNGDKLLFWLSPNDLVYVPTADELNNGMRLDNMDKGRIYKMISCSGPQCFFIPQNVSNAIIPVIELGANNKAEKSWNNEMIKVVCVPIRVDRLGCITQINNQK

SEQ ID NO: 296 - protein, 779 aa, Bacteroides oleiciplenus
MKEGNQYDVACEYAGYRHSKSSLTREEIDNKVLKNRLEILPKNSLRNPVVEKILNQMVNVVNAVIDTYGKPDEIRVELARELKKGAKEREELAKSIAQNTREHEAIRQLLQTEFGMMHVTRNDIIRYKLYEELKDNGYKTLYSDQYIPREKVFSKEIDIEHIIPQARLFDDSLSNKTLEYRAVNIEKGNKTAYDFVKEKYGNDGLRRYLNHCEALFKDKKTKLKKLKMEDQDIPDGFIDRDLRNTQYIAKKALSMLSEISRRVVATTGSITDELRKDWQLVDIMKELNLPKYEALGFVETFKDKDGRIIKKIKDWSKRNDHRHHAMDALTVAFTKDVFIQYFNNKNAFWMSGSKEHANITAIKNKYFEKGKALAPIPLELFRTEAKHHLENILVSIKAKNKVVTNNINRTKKKNGENLKLQQTPRGQLHLESIYGSYRQCIIRDEKVNASFDASKIANVSKSAYRNALLKRLEAYDNDPKKAFTGKNSLDKNPVYLDENKMEKVPDRVKIVEFETVYTIRKPIDPKLSIDKVVDARIRTLLKKRLEEYGGDAQRAFSNIEENPIWLNKEKGISVKRVAIRGISNAQALHDKKDKDGNPILDKEGKGIPTDFVNTSNNHHVAIYRKPVVDKMGQVILDENGSPRYELGEDVISFFEAVARVNLRQPVVDKDYKRSEGWQFLFSMKQNEYFVFPNEKTGFNPKEIDLLNPENYALISPNLFRVQKIGLNDYTFRHHLETSIQNNSNELKFITWIRCGKNGINGVIKVRVNHIGQIVSMGEY

SEQ ID NO: 297 - protein, 653 aa, Bacteroides oleiciplenus
MKKILGLDLGSSSIGWALVNEGANDEEKSSIIKLGVRVNPLTVDEAQNFEKGKSITTNADRTLKRGMRRNLQRYKQRREALVEVLKKHEFITAGTLMSEQGNKTTFETYRLRAKAVEEEISLEEFARVLLMINKKRGYKSSRKAKGDEDGVLIDGMDVAKKLYDEDLNPGELCLQLLEAGKKTLPDFYRSDLQDEFDKIWNFQKQFNPESFCDTAKEEVRGKNRTQTWTILSKYFVWTEGDSVWNNEEARTEERIKEYKLVGIKRTTKGYEQKLENYRWRVQALSEQLNPEIIAIVLQEINGQISASSGYLGAISDRSKELFFNHQTVGQSLMSELDKNPNGSLRNKVFYRQDYLDEFNTIWEKQSLYHKELTVELKKEIRDIIIFYQRRLKSQKGLISTCEFEQREIIVEKDGKRKTKIIGCKVIPRSHPLFQEFKIWQTLNDVEVYVADRRTKRKQDRKSTTLFSDTEDILLVEGKRYLYQEEKELLAKELFVRENMKKAEVLKLLFEDPKELDLNFKQIDGNRTGFALFSAYSKMIEKYGYESVNFKNSADEIIEKLQIIFADLGWNTELFSIDLSKDDKELEKQPYFRLWHLLYSFEGDNTPTGNGKLIEALMRLCSVEKEYASVLANVSFQEDYGSLSAKAIKKYYLI

SEQ ID NO: 298 - protein, 1436 aa, Bacteroides sp.
MKRILGLDLGTNSIGWALVDEAENKDERSSIVKLGVRVNPLTVDELTNFEKGKSITTNADRTLKRGMRRNLQRYKLRRETLMEVLKEHKLITEDTILSENGNRTTFETYRLRAKAATEKISLEEFARVLLMINKKRGYKSCRKAKGAEEGTLIDGMDIARELYNNNLTPGELCLQLLDAGKKYLPDFYRSDLQNELDRIWEKQKEYYPEILTEVLKEELRGKKRDAVWAICAKSFVWEEYYTEWNKEKGKTEQQEREHKLEGIYSKRKRDEAKRENLQWRVNGLKEKLSLEQLVIVLQEMNIQINNSSGYLGAISDRSKELYFNKQTVGQYQMEMLDKNPNASLRNMVFYRQDYLDEFNTLWEKQAEYHKELTGELKKEIRDIVIFYQRRLKSQKGLVGFCEFESRQIEVEIDGKKKIKTVGNRVIPRSSPLFQEFKIWQILNNIEVTVVGKKGKRRKQKDNSPTLFDGLDDTEQLELNGSRYLYQEEKELLAQELFVRDKMTKSDVLKLLFDNPQELDLNFKTIDGNKTGYTLFQAYSKMIEMSGHEPVDFKKTVEKVVEHVKAVFDLLNWNTDILGFNSNEELDNQSYYKLWHLLYSFEGDNTPTGNARLVQKITELYGFEKEYAIILANVTFQDDYGSLSAKAIHKILPHLKEGNRYDVACAYAGYKHSESSLTKEEIANKALKDRLTLLPKNNLRNPVVEKILNQMVNVINAIIDTYGKPDEIRVELARELKKNAKEREELTKFIAETTRKHEEFKILLQSEFGLTNVSRTDILRYKLYKELESCGYKTLYSNTYIPREKLFSKEFDIEHIIPQARLFDDSFSNKTLEARSINLEKGNKTAYDFVKEKFGESGADNSLDHYLNNIEDLFKSGKISKTKYNKLKMAEQDIPDGFINRDLRNTQYIAKKALSMLNEISRRVVATSGTITDKLRQDWQLVDVMKELNWEKYKALGLVEYFEDKDGRQIGRIKDWTKRNDHRHHAMDALTVAFTKDIFIQYFNNKNASLNSNTNEYAIKNKYFQNGRAIAPIPLREFRVEAKKHLENTLISIKAKNKVVTGNINKTKKRGGVNKYLQQTPRGQLHLETIYGSGKQYLTKEEKVNASFDMKKIATVSKSAYRDVLLKRLHENDNDPKKAFTGKNSLDKQPIWLDKEQTRKVPEKVKTVTLETIYTVRKEISPDLKVDKVIDAGVRKILTGRLNEYGNDAKKAFSNLDENPIWLNKEKGISIKRVTISGISNAQSLHVKKDKDGKPILDEDSRNIPVDFVNTGNNHHVAVYRRPVIDKRGQLVIDEAGNPKYELEEVVVSFFEAVTRANLGQPIIDKDYKTSEGWQFLFSMKQNEYFVFPNEKTGFNPKEIDLLDAENYGVISPNLFRVQKFAHKNYVFRHHLETTIKDTSSILKGITWIDFRSSKGLDAIVKVRVNHIGQIVSVGEY

SEQ ID NO: 299 - protein, 1510 aa, Bacteroides sp.
MKRILGLDLGTNSIGWALVDSEEQRILGMGSRIIPMDQGVLDTFSGGNPVETQTAARTAYRGTRRLRERALLRRERLIRVLNMMKFLPEHYASQIDFEKRLGQFFDEKEPKLAWKQNDEGRFEFIFQQSFNEMIEEFKNKGVVREDKKIPYDWTIYYLRKKALSQEIEKEELAWILLNFNQKRGYYQLRGEEEEENPNKLVEYYSLKIVDVIADEKPNSKGDIWYSLHLENGWIYRRSSKIPLFGWKDKTRDFIVTTDLNDDGTVKKDKEGIEKRSFRAPSENDWVLLKKKTESDIEKSHKTVGAYVYETLLQNPMQKVRGKLVRTIERKFYKDELKQILEKQREFHPELRDEDLYNDCVRELYRSNETYQFILSKRDFVHLFLDDILFYQRPLRSQKSAIGDCILEFKTYKDKDGNNIKEYLKVISKSNPLYQEFRIWQWLYNLKIYRKEDDEDVTLQFIANIEDKEQLFDFLSNRKSIEQKPLLEYLIKAKGLKKQVKTEAYRWNYVEDKIYPCSETKTMISTRLAKVENIPDNFFTKEIEQKLWHIIYSVTDKNEFEKALRTFAKKYDLDIASFVDNFKKIPPFKNEYGSFSEKAIKKLLPLMRLGKYWKWNDIDNNTQNRISKIITGEYDEEIKDIVREKSIALTNENDFQGLQLWLAQYLVYGRHSEADIAGKWHSVADLEKYLNEFKQHSLRNPIVEQIITETLRVVRDIWRKYGQGAENFFSEIHVELGRDMKNTADERKKIVNVVTENENTNLRIKALLMELKNNSDGKLEVENVRPYSPTQQDILKIYEEYAISTGLDNEKDEKVKEDIKKISRVAQPTTTELQRYKLWLEQKYCSPYTGKVIPLGKLFTEEYQIEHIIPKSRYYDDSFSNKVICEAAVNKLKDKCLGLEFIKNYHGQIVETGFGQKVTIFDEEAYQNFVKQHYAYNRSKRTKLLLEEIPEKMIERQMNDTRYISKFVLPLLSNLVRAEENDNGVNSKNVLPVNGKITTMLKQDWGLNDVWNDLILPRFVRMNELAKTIAFTSWNEQHQKYLPTVPLELSKGFQKKRIDHRHHAMDALVIACATRDHVNLLNNKHANTDTIRYDLQRKLRLFERVTYIDPQTKNNVTKDIPKEFKKPWDNFTVDARNELEKIIVSFKQNLRIINKATNIYTKYENGKKIKVGQKGLNWAIRKPLHKETVFAKVSLRKRKTVRLSEALKDWKKIVDKKLKQEIKRLTCQYGKFDVDTILRYFKDRKYQFGEVDVSKVKMYYFDEENAAVRKNVDTSFTEKFIQGSVTDTGIQKILLNHLEAKGNKVEIAFSPEGIEEMNKNIIQLNEGKLHLPIFKVRVYETIGNKFSVGVKGNKKDKYVEAAKGTNLFFAIYVDENGIRSYETIPLNIVIERLKQGLSVVPEKNRKEHSLLFYLSPNDLVYVPIEDERENIHAVNLDQLNNEQRKRIYKMVSCTGSECHFVPYYVASPIVNKVEYSSLNKIGRSLTGEMIKDVCIKLKVDRLGNVKGISGL

SEQ ID NO: 300 - protein, 1436 aa, Bacteroides sp.
MKRILGLDLGTNSIGWALVNEAENKDERSSIVKLGVRVNPLTVDELTNFEKGKSITTNADRTLKRGMRRNLQRYKLRRETLTEVLKEHKLITEDTILSENGNRTTFETYRLRAKAVTEEISLEEFARVLLMINKKRGYKSSRKAKGVEEGTLIDGMDIARELYNNNLTPGELCLQLLDAGKKFLPDFYRSDLQNELDRIWEKQKEYYPEILTDVLKEELRGKKRDAVWAICAKYFVWKETYTEWNKEKGKTEQQEREHKLEGIYSKRKRDEAKRENLQWRVNGLKEKLSLEQLVIVFQEMNTQINNSSGYLGAISDRSKELYFNKQTVGQYQMEMLDKNPNASLRNMVFYRQDYLDEFNMLWEKQAVYHKELTEELKKEIRDIIIFYQRRLKSQKGLIGFCEFESRQIEVDIDGKKKIKTVGNRVISRSSPLFQEFKIWQILNNIEVTVVGKKRKRRKLKENYSAIFEELNDAEQLELNGSRRLCQEEKELLAQELFVRDKMTKSEVLKLLFDNPQELDLNFKTIDGNKTGYALFQAYSKMIEMSGHEPVDFKKPVEKVVEYIKAVFDLLNWNTDILGFNSNEELDNQSYYKLWHLLYSFEGDNTPTGNGRLIQKMTELYGFEKEYATILANVSFQDDYGSLSAKAIHKILPHLKEGNRYDVACVYAGYRHSESSLTREEIANKVLKDRLMLLPKNSLHNPVVEKILNQMVNVINVIIDIYGKPDEIRVELARELKKNAKEREELTKSIAQTTKANEEYKTLLQTEFGLTNVSRTDILRYKLYKELESCGYKTLYSNTYISREKLFSKEFDIEHIIPQARLFDDSFSNKTLEARSVNIEKGNKTAYDFVKEKFGESGADNSLEHYLNNIEDLFKSGKISKTKYNKLKMAEQDIPDGFIERDLRNTQYIAKKALSMLNEISHRVVATSGSVTDKLREDWQLIDVMKELNWEKYKALGLVEYFEDRDGRQIGRIKDWTKRNDHRHHAMDALTVAFTKDVFIQYFNNKNASLDPNANEHAIKNKYFQNGRAIAPMPLREFRAEAKKHLENTLISIKAKNKVITGNINKTRKKGGVNKNMQQTPRGQLHLETIYGSGKQYLTKEEKVNASFDMRKIETVSKSAYRDALLKRLYENDNDPKKAFAGKNSLDKQPIWLDKEQMRKVPEKVKIVTLEAIYTIRKEISPDLKVDKVIDVGVRKILIDRLNEYGNDAKKAFSNLDKNPIWLNKEKGISIKRVTISGISNAQSLHVKKDKDGKPILDENGRNIPVDFVNTGNNHHVAVYYRPVIDKRGQLVVDEAGNPKYELEEVVVSFFEAVTRANLGLPIIDKDYKTTEGWQFLFSMKQNEYFVFPNEKIGFNPKEIDLLDVENYGLISPNLFRVQKFSLKNYVFRHHLETTIKDTSSILRGITWIDFRSSKGLDTIVKVRVNHIGQIVSVGEY

SEQ ID NO: 301 - protein, 1424 aa, Bacteroides sp.
MKRILGLDLGTNSIGWALVNEAETDEEVSSIIRLGVRVNPLTVDETQNFEKGKSITTNAERTLKRSMRRNLQRYKLRRDALVEFLKELGFITDETILSEQGNRTTFETCRLRAKAAEEEISLEELSRVLLMINKKRGYKSSRKVKKEEDGVLIDGMEIAKKLYEEDLTPGQLCSQLLESGKKVLPDFYHSDLQEELDRIWSVQKQFHPDVFCDAAKEEIKGKNRSQTWAILANYFVWKEEVVGWNDREAKNETIEKECKLVGLKRTTKGYELKKENYRWRAQALTEQLGLEEIAVVLQEINGQINASSGYLGAISDRSKVLYFNHQTVGQYQMAELDKNPHASLRNMVFYRQDYLDEFDRIWEKQAEFHKELTAELKKEIRDMIIFYQRRLKSQKGLISFCEFERLEIVVEKDGKKQTKVIGCKVIPRSHPLFQEFKVWQTLNDIKVLGREKKRNALSASESRALYPEEKEILARELAIKENMKKADVLKLLFENPQELDLNFKQIDGNRTGFSLFSAYSKMIEKYGYEPLDFKKPADEIIGQLRTIFTDLGWNTNLFTIDLTKEGKELEMQPYFRLWHLLYSFEGDNTSTGNGKLIEKIMQLCGVEKEYAVELASLSFQDDYGSLSAKAIKRILPYLKEGNLYDVACEYAGYRHSKSSLTKEEIENKVLKGKLEVLPKNSLRNPVVEKILSQMVNVINTIIDTYGKPDEIRVELARELKKSAKEREELTKAIAKSTREHEEIRKLLQDEFGMMNVSRNDIIRYKLYEELKDNGYKTLYSNQYIPKEKIFSKEIDIEHIIPQSRLFDDSLSNKTLEYKAINIEKGNKTAYDFVKEKYGEEGLQQYINRCESLFNDKKAKLRKLKMEQKDIPDGFIDRDLRNTQYIAKKALAMLNEICRRVVATTGSITDQLREDWQLVDVMKELNLPKYEALGFVETYEDKDGRKIKRIKDWTKRNDHRHHAMDALTVAFTKDAFIQYFNNKNAAQDSGNRNHTNIIGIKTRYFDKGRALPPIPLEQFRIEAKQHLEKLLVSIKAKNKVVTVNVNRTKKRKGENTKIQQTPRGQLHLETVYGSHKQYVTKIEKVNASFDAAKIATVSKRAYRNALLKRLETFGNDPKKAFTGKNALEKNPLYADKYQTIRVPEKVQTVEFETIYTIRKPVDPALNVDKVVDVKVRAILERRLKEYGGDPKKAFVNFWENPIWLNKEKGISIKRVSIRGINNAQSIHVKKDKNGNPIWDENGKQIPVDFVNTGNNHHVAIYRKPVLDKKGQVTFDEDGNLMYELDEVVVPFFEAVTRANLGLPIIDKDYRKSEGWQFLFSMKQNEYFVFPNEKTGFNPKEVDLLNPDNYAMISPNLFRVQTMSKVMYGNNVVRDYKFRHHLETTVKDMKELKDIAYKQYKTLSFGNSVVKIRINHIGQIVSVGEY

SEQ ID NO: 302 - protein, 1055 aa, Bacteroides sp.
MRIYRKDLAQDVDVTNELLKTEEDYVALFDWLNGKKEIDQKAFLKYPLFGLKKEVENYRWNYVQDKPYPCNETRSSMLARLEKCDISIEFLTKENEEALWHILYSVEDKNEIVKALQKFADKHDLNASFVDVFQKFPPFKKEYGSYSAKAIKKLLPLMRMGKYWSENSIDKGTRERMDKIITGEYDEKIENRVREKAIHLADVSDFKGLPLWLVCYIVYGRHSEAKEITQWKSPADIDLYLRSFKQHSLRNPIVEQIIIETLRVVRDIWKQVGNIDEIHVELGREMKNPADKRKKMTQQMSENENTNLRIKYLLTEFLNPEYEVENVRPYSPSQQDILRIYEEGVLNSVSDLPEEISDILKKFTETDLKKRPSRSEVLRYKLWLEQKYRSPYTGEVIPLGKLFTPAYEIEHVIPQSCYFDDSFSNKVICEAEVNKLKSNLLGHEFIVKHHGEIVELPFGKKVRIFTVDEYEQFVKDNYSRTRSKMKKLLMDDIPEEFVARQLNDSRYISKVVKSLLSNIVREKGEEEAISKNVIPCTGGVTDRLKKDWGINEVWNKIILPRFQRLNELTGTNKFTTKNVGIQEIPTMPLELQKGFNKKRIDHRHHAMDAIIIACANRNIINYLNNESATAKAELSRYDLQKMLCDKAKTDNNGNYKWVIRKPWASFTQDTYLALENIIVSFKQNLRVINKATNHFLHYNEEGKKIFVKQGKGDNWAIRKSMHKDTVFGEVNLRRIKTVALNEAMKNPQSIVVKDFKRKLLELWNLGFDAKRIKKYFEDNRETWSDINLSKIEVYYFSKDTKDRFFATRKPLDTSFDRKKIENNITDTGIQKILLRHLELKDNNPDIAFSPDGIDEMNRNIIQLNNGKYHQPIIKVRWYEQADKFAVGQTGNKSSKFVEAAKGTNLFFAVYESNILDKKTNTIIKKRNYATIPLNVAIERQKQGLPVAPEDENGNDPIFVLSPNDLVYLPTAADLANGIIAQPLDRGRIYKMVSCTGNEGYFIPARIANPILQTIELGSNNKAQKAWTDEMIKEICMPIKVDRLGNVLESSSSYKK

SEQ ID NO: 303 - protein, 1055 aa, Bacteroides sp.
MRIYRKDLAQDVDVTNELLKTEEDYVALFDWLNGKKEIDQKAFLKYPVFGLKKEIENYRWNYVQDKPYPCNETRSLMLARLEKCDISIEFLTKENEEALWHILYSVEDKNEIVKALQKFADKHDLNASFVDVFQKFPPFKKEYGSYSAKAIKKLLPLMRMGKYWSENSIDKGTRERIDKIITGEYDEKIENRVREKAIHLADVSDFKGLPLWLVCYIVYGRHSEAKEIIQWKSPADIDSYLRSFKQHSLRNPIVEQIIIETLRVVRDIWKQVGNIDEIHVELGREMKNPADKRKKMTQQMSENENTNLRIKYLLTEFLNPEYEVENVRPYSPSQQDILRIYEEGVLNSVSDLPEEISDILKKFTETDLKKRPSRSEVLRYKLWLEQKYRSPYTGEVIPLGKLFTPAYEIEHVIPQSCYFDDSFSNKVICEAEVNKLKSNLLGHEFIVKHHGEIVELPFGKKVRIFTVDEYEQFVKDNYSRTRSKMKKLLMDDIPEEFVTRQLNDSRYISKVVKSLLSNIVREKGEEEAISKNVIPCTGGVTDRLKKDWGINEVWNKIILPRFQRLNELTGTNKFTTKNVGIQEIPTMPLELQKGFNKKRIDHRHHAMDAIIIACANRNIINYLNNESATAKAELSRYDLQKMLCDKAKTDNNGNYKWVIRKPWASFTQDTYLALENIIVSFKQNLRVINKATNRFLHYNEEGKKIFVKQGKGDNWAIRKSMHKDTVFGEVNLRRIKTVALNEAMKNPQSIVVKDFKRKLLELWNLGFDAKRIKKYFEDNRETWSDINLSKIEVYYFSKDTKDRFFATRKPLDTSFDRKKIENNITDTGIQKILLRHLELKDNNPDIAFSPDGIDEMNRNIIQLNNGKYHQPIIKIRWYEQADKFAVGQTGNKSSKFVEAAKGTNLFFAVYESNILDKKTNTIIKKRNYATIPLNVAIERQKQGLPVAPEDENGNDPIFVLSPNDLVYLPTDDELANGIIAQPLDRGRIYKMVSSSGEQCFFIKHIVANVLVDKFEFSPLNKMERALTGEMIKMICIPIKVDRLGNVLESSSSYKK

SEQ ID NO: 304 - protein, 286 aa, Bacteroides uniformis
MLSYKYDKKKIEKYFKENAFLWKELDIAKVAVYYFTENTTEPLVAVRKSLDSTFNEKKIASVTDTGIQKILLNHLKSKEGKAELAFSAEGIEEMNRNLLQLNDGKGHQPIYKVRVYEPRGNKFKVGVLGNKGAKWVEAAKGTNLFFAIYITEDGNRTYETIPLNWVIEREKQGLVPVPDRNEKGDKLLFWLSPNDLVYLPTEEERDFGRINEPIDRGRIYKMVSSSGNQCFFIPQSISNAIISTKELGSNNKAEKSWDGEMIKNICIPVKVDRLGRIIEVKYRVNE

SEQ ID NO: 305 - protein, 1508 aa, Bacteroides uniformis
MRTILGLDLGTNSIGWAVINSVIKEQTERIWIEMAGSRIIPMDAAILGDFDKGNSISQTAERTRFRGVRRLRERQLLRRERLHKVLKILGFLPEHYLKGIDFEKHTGKFLSGSEPKLPWVKDRWGKYSFLFQTAFNEMLADFAKHQPSLVFDGKKIPYDWTVYYLRKKALTEMISKEELAWILLNFNQKRGYYQLRGEEEEDNAGKSVEFYALKVLSVEATDEKKGRDIWYNVHLENGWVYRRSSNVPLDWEGRVKEFIVTTDLNPDGTPKLDKYGEVKRSFRAPKEDDWMLIKKRTEADITGTHKTIGSYIYDALLQEPQQKIIGKLVKTVERKFYKEELNFILQKQCAFHAELQDRDLYMRCIEALYPGNEVQRRNIANRDFIYLLIDDVLFYQRPLKTKKSLIANCPYEENEYVNRKTGEIKTAPLKCIAKSHPLFQEFRLWYFLSNIRVYQKEREVNGTLHLDVDVTTEFLKTEDDYVALFDWLNSRKEIDQKAFLRYPAFGLKKEINNYRWNYVEDKFYPCNETRHAILSRLEKAGIGIDFLSDEKETALWHILYSVSDKQEIEKALATFAVKNGLNESFVEVFKKFPPFKSEYGAYSAKAIKKLLPLMRCGKYWDMSLIDGTTKERIERIIAGECDESIGAKVREKAMNLSDISCFKRLPLWLACYVVYNRHSEDKEITKWETPADIDAYLAAFKQHSLRNPIVEQVITETLRVVRDIWKQVGKIDEIRIELGREMKNPADKRKRMTTQILENENANLRIKALLAEFVNPEYGVENVRPYSPSQQEILRIYEDAVLKGEEQIPEDIDVILKKFNTSKLPTKSEFLRYKLWLEQKYRSPYTGELIPLAKLFTAAYEIEHVIPQSRYFDDSFSNKVICESAVNKLKDNQLGYEFIKNHHGQKVEVGFGKTVEIFSVDSYERFVKEQYAKSGIKMKKLLMDDIPEQFIERQLNDSRYISKVVKGLLSNIVREKNDSGEYEPEAVSKNILVCTGSVTDRLKKDWGMNDVWNSIVSPRFERLNALTETQCFGHWENKDGKKVFQTAVPLEYQKGFSKKRIDHRHHAMDAIVIACATRNHVNYLNNESASRNAKISRYDLQRLLCDKSRGDGNGNYRWIIKKPWTTFTQDAREALSGIIVSLKQNLRIINKTTNIYQHFDANGTRVYEKQKIGDSWAIRKPMHKDTVFGAVNLRKVKVVRLSVALDTPSMIVNKRVKNKVLELLSYKYDKKKIEKYFKENAFLWKELDIAKVAVYYFTENTTEPLVAVRKSLDSTFNEKKIASVTDTGIQKILLNHLKSKEGKAELAFSAEGIEEMNRNLLQLNDGKGHQPIYKVRVYEPRGNKFKVGVLGNKGAKWVEAAKGTNLFFAIYITEDGNRTYETIPLNWVIEREKQGLVPVPDRNEKGDKLLFWLSPNDLVYLPTEEERDFGRINEPIDRGRIYKMVSSSGNQCFFIPQSISNAIISTKELGSNNKAEKSWDGEMIKNICIPVKVDRLGRIIEVKYRVNE

SEQ ID NO: 306 - protein, 1210 aa, Bacteroides uniformis
MRTILGLDLGTNSIGWAVINSVIKEQTERIWIEMAGSRIIPMDAAILGDFDKGNSISQTAERTRFRGVRRLRERQLLRRERLHKVLKILGFLPEHYLKGIDFEKHTGKFLSGSEPKLPWVKDRWGKYSFLFQTAFNEMLADFAKHQPSLVFDGKKIPYDWTVYYLRKKALTEMISKEELAWILLNFNQKRGYYQLRGEEEEDNAGKSVEFYALKVLSVEATDEKKGRDIWYNVHLENGWVYRRSSNVPLDWEGRVKEFIVTTDLNPDGTPKLDKYGEVKRSFRAPKEDDWMLIKKRTEADITGTHKTIGSYIYDALLQEPQQKIIGKLVKTVERKFYKEELNFILQKQCAFHAELQDRDLYMRCIEALYPGNEVQRRNIANRDFIYLLIDDVLFYQRPLKTKKSLIANCPYEENEYVNRKTGEIKTAPLKCIAKSHPLFQEFRLWYFLSNIRVYQKEREVNGTLHLDVDVTTEFLKTEDDYVALFDWLNSRKEIDQKAFLRYPAFGLKKEINNYRWNYVEDKFYPCNETRHAILSRLEKAGIGIDFLSDEKETALWHILYSVSDKQEIEKALATFAVKNGLNESFVEVFKKFPPFKSEYGAYSAKAIKKLLPLMRCGKYWDMSLIDGTTKERIERIIAGECDESIGAKVREKAMNLSDISCFKRLPLWLACYVVYNRHSEDKEITKWETPADIDAYLAAFKQHSLRNPIVEQVITETLRVVRDIWKQVGKIDEIRIELGREMKNPADKRKRMTTQILENENANLRIKALLAEFVNPEYGVENVRPYSPSQQEILRIYEDAVLKGEEQIPEDIDVILKKFNTSKLPTKSEFLRYKLWLEQKYRSPYTGELIPLAKLFTAAYEIEHVIPQSRYFDDSFSNKVICESAVNKLKDNQLGYEFIKNHHGQKVEVGFGKTVEIFSVDSYERFVKEQYAKSGIKMKKLLMDDIPEQFIERQLNDSRYISKVVKGLLSNIVREKNDSGEYEPEAVSKNILVCTGSVTDRLKKDWGMNDVWNSIVSPRFERLNALTETQCFGHWENKDGKKVFQTAVPLEYQKGFSKKRIDHRHHAMDAIVIACATRNHVNYLNNESASRNAKISRYDLQRLLCDKSRGDGNGNYRWIIKKPWTTFTQDAREALSGIIVSLKQNLRIINKTTNIYQHFDANGTRVYEKQKIGDSWAIRKPMHKDTVFGAVNLRKALIPQHYNLTLFISS

SEQ ID NO: 307 - protein, 1504 aa, Bacteroides vulgatus
MKNIVGLDLGTNSIGWAVVNGSVNDDGSEQLVKIQASGSRIIPMDAAMIGDFNKGNSISQTAERTRLRGVRRLSERYLLRRERLHRILDILGFLPFHFAQDLDRHGKIVKGKEPKLAWRKNEAGQFEFIFQDSFKEMLEDFKLNHPNLITDDKKVPYDWTIYYLRKKGLTSKISKEELAWILLNFNQKRGYYQLRGEEEEENKNKLVEFYALKVVAVEDSGEKKGKDIWYNVHLENGWVYRRTSNMPLDWVGKTKEFIVTTDLEKDGTPKKDKEGNVKRSFRAPKEDDWSLLKKKTEADIDQTHKTVGVYIYDTLLGNPSQKIRGRLVRTIERKYYKEELKQILEKQKEFHLELQDRALYAACIEELYPINEAHRNNVGNRDFTYLFLEDILFYQRPLKSKKSLIDNCPYEENQGLDKETGEIKSFPVKCIAKSHPLFQEFRLWQFIVNLRIYRKDLAQDVDVTNELLKTEEDYVALFDWLNGKKEIDQKAFLKYPVFGLKKEIENYRWNYVQDKPYPCNETRSLMLARLEKCDISIEFLTKENEEALWHILYSVEDKNEIVKALQKFADKHDLNASFVDVFQKFPPFKKEYGSYSAKAIKKLLPLMRMGKYWSENSIDKGTRERIDKIITGEYDEKIENRVREKAIHLADVSDFKGLPLWLVCYIVYGRHSEAKEITQWKSPADIDSYLRSFKQHSLRNPIVEQIIIETLRVVRDIWKQVGNIDEIHVELGREMKNPADKRKKMTQQMSENENTNLRIKYLLTEFLNPEYEVENVRPYSPSQQDILRIYEEGVLNSVSDLPEEISDILKKFTETDLKKRPSRSEILRYKLWLEQKYRSPYTGEVIPLGKLFTPAYEIEHVIPQSCYFDDSFSNKVICEAEVNKLKSNLLGHEFIVKHHGEIVELPFGKKVRIFTVDEYEQFVKDNYSRTRSKMKKLLMDDIPEEFVTRQLNDSRYISKVVKSLLSNIVREKGEEEAISKNVIPCTGGVTDRLKKDWGINEVWNKIILPRFQRLNELTGTNKFTTKNVGIQEIPTMPLELQKGFNKKRIDHRHHAMDAIIIACANRNIINYLNNESATAKAELSRYDLQKMLCDKAKTDNNGNYKWVIRKPWASFTQDTYLALENIIVSFKQNLRVINKATNRFLHYNEEGKKIFVKQGKGDNWAIRKSMHKDTVFGEVNLRRIKTVALNEAMKNPQSIVVKDFKRKLLELWNLGFDAKRIKKYFEDNRETWSDINLSKIEVYYFSKDTKDRFFATRKPLDTSFDRKKIENNITDTGIQKILLRHLELKDNNPDIAFSPDGIDEMNRNIIQLNNGKYHQPIIKIRWYEQADKFAVGQTGNKFSKFVEAAKGTNLFFAVYESNILDKKTNTIIKKRNYATIPLNVAIERQKQGLPVAPEDENGNDPIFVLSPNDLVYLPTDDELANGIIAQPLDRGRIYKMVSCTGNEGHFIPARIANPILQTIELGSNNKAQKAWTDEMIKEICMPIKVDRLGNVLESSSSYKK

SEQ ID NO: 308 - protein, 1153 aa, Barnesiella intestinihominis
MKNILGLDLGLSSIGWSVIRENSEEQELVAMGSRVVSLTAAELSSFTQGNGVSINSQRTQKRTQRKGYDRYQLRRTLLRNKLDTLGMLPDDSLSYLPKLQLWGLRAKAVTQRIELNELGRVLLHLNQKRGYKSIKSDFSGDKKITDYVKTVKTRYDELKEMRLTIGELFFRRLTENAFFRCKEQVYPRQAYVEEFDCIMNCQRKFYPDILTDETIRCIRDEIIYYQRPLKSCKYLVSRCEFEKRFYLNAAGKKTEAGPKVSPRTSPLFQVCRLWESINNIVVKDRRNEIVFISAEQRAALFDFLNTHEKLKGSDLLKLLGLSKTYGYRLGEQFKTGIQGNKTRVEIERALGNYPDKKRLLQFNLQEESSSMVNTETGEIIPMISLSFEQEPLYRLWHVLYSIDDREQLQSVLRQKFGIDDDEVLERLSAIDLVKAGFGNKSSKAIRRILPFLQLGMNYAEACEAAGYNHSNNYTKAENEARALLDRLPAIKKNELRQPVVEKILNQMVNVVNALMEKYGRFDEIRVELARELKQSKEERSNTYKSINKNQRENEQIAKRIVEYGVPTRSRIQKYKMWEESKHCCIYCGQPVDVGDFLRGFDVEVEHIIPKSLYFDDSFANKVCSCRSCNKEKNNRTAYDYMKSKGEKALSDYVERVNTMYTNNQISKTKWQNLLTPVDKISIDFIDRQLRESQYIARKAKEILTSICYNVTATSGSVTSFLRHVWGWDTVLHDLNFDRYKKVGLTEVIEVNHRGSVIRREQIKDWSKRFDHRHHAIDALTIACTKQAYIQRLNNLRAEEGPDFNKMSLERYIQSQPHFSVAQVREAVDRILVSFRAGKRAVTPGKRYIRKNRKRISVQSVLIPRGALSEESVYGVIHVWEKDEQGHVIQKQRAVMKYPITSINREMLDKEKVVDKRIHRILSGRLAQYNDNPKEAFAKPVYIDKECRIPIRTVRCFAKPAINTLVPLKKDDKGNPVAWVNPGNNHHVAIYRDEDGKYKERTVTFWEAVDRCRVGIPAIVTQPDTIWDNILQRNDISENVLESLPDVKWQFVLSLQQNEMFILGMNEEDYRYAMDQQDYALLNKYLYRVQKLSKSDYSFRYHTETSVEDKYDGKPNLKLSMQMGKLKRVSIKSLLGLNPHKVHISVLGEIKEIS

SEQ ID NO: 309 - protein, 1352 aa, Belliella baltica
MKKILGLDLGTTSIGWAFIKEPEKDVVGSEIVDMGVRIVPLSSDEENDFAKGNTISINADRTLKRGARRNLQRFKQRRNALLEIFKEKKLISTNFKYAEDGPSSTFSTLNLRAKAAKEKIELQDLVKVLLQINKKRGYKSSRKAKSEEDDGSAIDSMGIAKELYENDLTPGQWVYEALQKGRKNVPDFYRSDLQEEFKKIVNYQSEFFPDIFNASFVEDWMGKASTPTKQYFNKKGVQLAENKGKREERRLQEYKWRAEAVNFKIDLSEIALILSQINSQISNSSGYLGAISDRSKELYFKNLTVGQYLYQQIKKNPHTRLKGQVFYRQDYLDEFERIWSVQSSFYPQLNDALKREVRDITIFFQRRLKSQKHLISNCEFEDHHKVVPKSHPVFQEFRIWQNLNNLLLIKKDNLNEKFDLELESKIALANELAFKRELNVKDALKILGLKPNEWEFNFTKIEGNRTNQAFFDAFAKIIELEDGEPIDLGDLKADDILDQFSEAFLRIGIDTELLQVNSDIEGAEYEKQSYIQFWHLLYSSEDDQKLKLNLIRKFGFKPEHAKILASISLQDDHASLSSRAIKKILPHLQSGLIYDKACTYAGYNHSSSFTKDENEKRELRAELELLKKNSLRNPVVEKILNQMINVVNAILKDPELGRPDEIRVEMARELKANAEQRKNMTSNIASATRDHDKYREILKSEFGLKRVTKNDLLRYKLWLETDGISLYTGKPIEASKLFSKEYDIEHIIPKARLFDDSFSNKTICERQLNIDKANVTAFSFLQNKLSADEFEQYQSRVKSLYGKLSKAKIQKLLMANDKIPEDFIARQLQETRYISKKAKEILFEISRRVSVTTGTITDKLREDWGLVEIMKELNWEKYDKLGLTYTIEGKHGERLNKIKDWSKRNDHRHHAMDALTVALTKPAYIQYLNNLNAKGLNNKKGTEVFAIEQKYLKRENGKLCFIPPIENIRSEAKKHLSRILVSYKAKNKVVTINKNKTKSKAGLNEQIALTPRGQLHKETVYGKSFHYSTKFEKIGASFNVQKINTVAKKEEREALLKRLAENGNDPKKAFTGKNTLNKMPIYLDLGKNIKLSEKVKTVVLEQNYTIRKNIDPDLKVDKVIDVGIKRILESRLEEFGGNAKLAFSNLEENPIWLNKEKGISIKRVKISGVSNVESLHVKKDHFGEPILDQEGNEIPVDFVSTGNNHHVAIYEDENGNLQEEVVSFFEAVVRQNQGLPIIKKNHTLGWKFLFTLKQNEYFVFPSDDFVPADVDLMDEQNYHLISPNLFRVQKIARKNYVFNNHLETKAVDNDLLKSKKELSKITYHFYQTPEHLRGIIKIRINHLGKIIQIGEY

SEQ ID NO: 310 - protein, 1415 aa, Bergeyella zoohelcum
MKHILGLDLGTNSIGWALIERNIEEKYGKIIGMGSRIVPMGAELSKFEQGQAQTKNADRRTNRGARRLNKRYKQRRNKLIYILQKLDMLPSQIKLKEDFSDPNKIDKITILPISKKQEQLTAFDLVSLRVKALTEKVGLEDLGKIIYKYNQLRGYAGGSLEPEKEDIFDEEQSKDKKNKSFIAFSKIVFLGEPQEEIFKNKKLNRRAIIVETEEGNFEGSTFLENIKVGDSLELLINISASKSGDTITIKLPNKTNWRKKMENIENQLKEKSKEMGREFYISEFLLELLKENRWAKIRNNTILRARYESEFEAIWNEQVKHYPFLENLDKKTLIEIVSFIFPGEKESQKKYRELGLEKGLKYIIKNQVVFYQRELKDQSHLISDCRYEPNEKAIAKSHPVFQEYKVWEQINKLIVNTKIEAGTNRKGEKKYKYIDRPIPTALKEWIFEELQNKKEITFSAIFKKLKAEFDLREGIDFLNGMSPKDKLKGNETKLQLQKSLGELWDVLGLDSINRQIELWNILYNEKGNEYDLTSDRTSKVLEFINKYGNNIVDDNAEETAIRISKIKFARAYSSLSLKAVERILPLVRAGKYFNNDFSQQLQSKILKLLNENVEDPFAKAAQTYLDNNQSVLSEGGVGNSIATILVYDKHTAKEYSHDELYKSYKEINLLKQGDLRNPLVEQIINEALVLIRDIWKNYGIKPNEIRVELARDLKNSAKERATIHKRNKDNQTINNKIKETLVKNKKELSLANIEKVKLWEAQRHLSPYTGQPIPLSDLFDKEKYDVDHIIPISRYFDDSFTNKVISEKSVNQEKANRTAMEYFEVGSLKYSIFTKEQFIAHVNEYFSGVKRKNLLATSIPEDPVQRQIKDTQYIAIRVKEELNKIVGNENVKTTTGSITDYLRNHWGLTDKFKLLLKERYEALLESEKFLEAEYDNYKKDFDSRKKEYEEKEVLFEEQELTREEFIKEYKENYIRYKKNKLIIKGWSKRIDHRHHAIDALIVACTEPAHIKRLNDLNKVLQDWLVEHKSEFMPNFEGSNSELLEEILSLPENERTEIFTQIEKFRAIEMPWKGFPEQVEQKLKEIIISHKPKDKLLLQYNKAGDRQIKLRGQLHEGTLYGISQGKEAYRIPLTKFGGSKFATEKNIQKIVSPFLSGFIANHLKEYNNKKEEAFSAEGIMDLNNKLAQYRNEKGELKPHTPISTVKIYYKDPSKNKKKKDEEDLSLQKLDREKAFNEKLYVKTGDNYLFAVLEGEIKTKKTSQIKRLYDIISFFDATNFLKEEFRNAPDKKTFDKDLLFRQYFEERNKAKLLFTLKQGDFVYLPNENEEVILDKESPLYNQYWGDLKERGKNIYVVQKFSKKQIYFIKHTIADIIKKDVEFGSQNCYETVEGRSIKENCFKLEIDRLGNIVKVIKR

SEQ ID NO: 311 - protein, 1430 aa, Bergeyella zoohelcum
MKHILGLDLGTNSIGWAVVKEAQNDNEQSEIVDVGVRVNPLTTDEKTNFEKGKPISTNADRTLKRSARRNLQRYKLRRKELIELLKEHQLISTDTILTENGKGTTFQTLELRAKSAKEKISLEELARVFLTINKKRGYKSSRKAKNEDEGQLIDGMEIAKRLYEENLTTGQLSLQLLKEGKKSLPDYYRSDLQFELDKVWNFQKQFHSDILTDEFYAQLKGKGQRATSALFLAKYQIYTAENKGSREDKKLQAYQWRVDALSKELTREQLAFVITEINNNLNNSSGYLGAISDRSKELYFNNETVGEYLWKQIAANPHTSLKNQVFYRQDYLDEFEQIWKTQSAFYPEILTDELKKELRDVVIFYQRKLKSQKSLVSFCEFENKEIEIKKEDGTSTKKVIGLKVAPKSSPLFQEFKIWQNLNNVLIRKKGSKTKKVAKNQQAVLFEEEKTISELDLEAKQALFNELNLKGNLKADYCLEILGYSPKEWEMNYSVLEGNRTNKALYEAYLKITDLEGYDAKNHLKVKLNKDEVELDDLKVPASEIKDMVQAIFKEAGINTDILHFNAELDGKDFENQASYQLWHLLYSYEGDDSKSGNELLYKLLETKFGFKKEYAQILANVSLSDDYGSLSTKAMRKIHPYIKENKFSTACELAGYRHSKHSLTKEENDNRVLKDSLEVLKKNSLRQPVVEKILNQMINLVNALLKKYRTENPNFKFDEIRIELARELKKNAEERANMTANINKAKTEHEKIIKILKNEFGLPNPTRNDIIRYRLYEELKANGYKDLYTNIKIPQEKLFTKEIDIEHIIPKSRVFDDSFSNKTLSFRKTNLDKGERTAFDYMESKFGADKLEEYVARVEDLYKNNIISKAKYQKLLKKESEIGDGFVERDLRETQYIAKKAKEILLQITPNVLSTSGGITDRLREDWDLINVMKELNLPKYRALGLTQMEDRKYGQQVEVITDWTKRNDHRHHAMDALTVAFTKHNHIQYLNYLNARKNEKHKEHSNIMGIQQLETIKVTDKNGNEKRVFKAPMPNFRQVTKAFLENILISHKAKNKVVTKNKNKVAGSNKVQEVLTPRGQLHKETVYGKYQYYVQKEEKIGAKFDLETIKKVANPLYQSLLKKRLEENGGDPKKAFTGKNSLAKNPIYLDDTQTEQLPEKVKLVWLENSFSIRKDITPENFKDEKLIDKILDEGVKRILKERLQSFGNDAKKAFSDLDKNPIWLNKEKGITIKRVTISGVANAEPLHTKKDHLGKEILDKEGKPIPVDFISTGSNHHVAVYRDEKGNLQEKVVSVFEAVVRANQGLPIIDKTYNQHLGWEFLFTMKQNEMFVFPNESTGFNPNDIDLLDPKNKRIISPNLFRVQKFSKLQYGNSFVREFVFRHHLETTVEDRKELQGITYKQMKNSTFFNDIIKVRINHLGDIVSIGEY

SEQ ID NO: 312 - protein, 1281 aa, Bifidobacterium bifidum
MEDDSQHDIREIYLAIHHMVKYRGNFLVEGTLESSNAFKEDELLKLLGRITRYEMSEGEQNSDIEQDDENKLVAPANGQLADALCATRGSRSMRVDNALEALSAVNDLSREQRAIVKAIFAGLEGNKLDLAKIFVSKEFSSENKKILGIYFNKSDYEEKCVQIVDSGLLDDEEREFLDRMQGQYNAIALKQLLGRSTSVSDSKCASYDAHRANWNLIKLQLRTKENEKDINENYGILVGWKIDSGQRKSVRGESAYENMRKKANVFFKKMIETSDLSETDKNRLIHDIEEDKLFPIQRDSDNGVIPHQLHQNELKQIIKKQGKYYPFLLDAFEKDGKQINKIEGLLAFRVPYFVGPLVVPEDLQKSDNSENHWMVRKKKGEITPWNFDEMVDKDASGRKFIERLVGTDSYLLGEPTLPKNSLLYQEYEVLNELNNVRLSVRTGNHWNDKRRMRLGREEKTLLCQRLFMKGQTVTKRTAENLLRKEYGRTYELSGLSDESKFTSSLSTYGKMCRIFGEKYVNEHRDLMEKIVELQTVFEDKETLLHQLRQLEGISEADCALLVNTHYTGWGRLSRKLLTTKAGECKISDDFAPRKHSIIEIMRAEDRNLMEIITDKQLGFSDWIEQENLGAENGSSLMEVVDDLRVSPKVKRGIIQSIRLIDDISKAVGKRPSRIFLELADDIQPSGRTISRKSRLQDLYRNANLGKEFKGIADELNACSDKDLQDDRLFLYYTQLGKDMYTGEELDLDRLSSAYDIDHIIPQAVTQNDSIDNRVLVARAENARKTDSFTYMPQIADRMRNFWQILLDNGLISRVKFERLTRQNEFSEREKERFVQRSLVETRQIMKNVATLMRQRYGNSAAVIGLNAELTKEMHRYLGFSHKNRDINDYHHAQDALCVGIAGQFAANRGFFADGEVSDGAQNSYNQYLRDYLRGYREKLSAEDRKQGRAFGFIVGSMRSQDEQKRVNPRTGEVVWSEEDKDYLRKVMNYRKMLVTQKVGDDFGALYDETRYAATDPKGIKGIPFDGAKQDTSLYGGFSSAKPAYAVLIESKGKTRLVNVTMQEYSLLGDRPSDDELRKVLAKKKSEYAKANILLRHVPKMQLIRYGGGLMVIKSAGELNNAQQLWLPYEEYCYFDDLSQGKGSLEKDDLKKLLDSILGSVQCLYPWHRFTEEELADLHVAFDKLPEDEKKNVITGIVSALHADAKTANLSIVGMTGSWRRMNNKSGYTFSDEDEFIFQSPSGLFEKRVTVGELKRKAKKEVNSKYRTNEKRLPTLSGASQP

SEQ ID NO: 313 - protein, 1121 aa, Bifidobacterium dentium
MSVGLAAIEVDETGFPIRILNIQSVIHDGGIDPQLGKKKSISRKAISGVARRTRRMRRRKVVRLRQLDATLESLGFPIVEPDSLDTWEIWLTRAKLASSYIQDDETRKEDVSIALRHIARHRGWRNPYSNVESLFVDVAPSEQYEELRRKAEEKLGTSLSGNPTSAEIVECILKRQVGEVQLRTRSRKGVNGNAVEKEGLLPTKLMQSDNAAEIRRIFKVQRIDDETGRKLLRAVFKACSPKGSVERRVGRDALAPGLPRALKASLAFQEYRIANVLTNLVISEDGTKRKLTIAEKQRVFGFLSSNETDDITWIDVAEKLGLERRQIQGVGCLTADGEERISSTPPRNITALHIHSAKPVIREKLVAWWKAASPTVRETMVELLSNTVDIDRVREDMDYSSAVAFIDSLGDEELTALDSVDLLSGRAAYSRQTLKQLTERMLNTDDDLHEARKAVFGVDDNWKPPVDAISTSVGNPAVDRVLKIVNRYLLACQKRWRNPQSVQIEHVRESFSSVAKAKETERVQGERARYRNDLRRELCEQEGLNKIRESDIRRWESVQRQNGTCLYCGSPITFRTCEMDHIVPRKGVGSTNTRVNLAAACAACNKLKSNTAFSVWARTEGAANRKVSQRDAIERVKTFIFNKSVPPREQRAFKQAVISRLRQAESDPAIDNRSIESVAWMADELHRRIEAYFNQDADVSGNTPATQVWVFQGRVTALARKASGIEGRIHFAGEWKKTRLDRRHHAVDAAVIAMMNHSAAQTLVERDSLRLSQWITRKPETWKNYPFSEGQKKTRFKEWLDCMNALLDLLNDALDSDRVPVTRCQRMSLGNSQAHAATIRKMKRVELFSPMDADLIRRASTPALYCALTRLPEYSPEKGLPENRGREIVLNGRHIRSTETVDFFASGAAQLMVRNGSAEIGDSIHHMRIYRYRKTGAKSQEYVYGMIRVFQIDLLHASSENLFAVQLPSQSVSVRYGDKNVVQAIQEGRAEYLGHIVPNDEILISYEGVRMKDSEKIGAYANDFSGTASELAQRRHWVVVGSDVSKLALRPSYLSEEGLENSGSESERLSKQTRKVIEGKGWVVAVNILAKYHPVVIRRNALGEPRFRTNSGMPVSWRWDR

SEQ ID NO: 314 - protein, 354 aa, Bifidobacterium longum
AKQYVNSASIDDAEAETMKTTVSVFQGRVTASARRAAGIEGKIHFIGQQSKTRLDRRHHAVDASVIAMMNTAAAQTLMERESLRESQRLIGLMPGERSWKEYPYEGTSRYESFHLWLDNMDVLLELLNDALDNDRIAVMQSQRYVLGNSIAHDATIHPLEKVPLGSAMSADLIRRASTPALWCALTRLPDYDEKEGLPEDSHREIRVHDTRYSADDEMGFFASQAAQIAVQEGSADIGSAIHHARVYRCWKTNAKGVRKYFYGMIRVFQTDLLRACHDDLFTVPLPPQSISMRYGEPRVVQALQSGNAQYLGSLVVGDEIEMDFSSLDVDGQIGEYLQFFSQFSGGNLAWKHWV

SEQ ID NO: 315 - protein, 1124 aa, Bifidobacterium longum
LTGHSGHTFWPTSSSPPIQLEQEKRPLPQRNTSQNGHTFWPITRERCFMRGKRYRIGIDVGLNSVGLAAVEVSDENSPVRLLNAQSVIHDGGVDPQKNKEAITRKNMSGVARRTRRMRRRKRERLHKLDMLLGKFGYPVIEPESLDKPFEEWHVRAELATRYIEDDELRRESISIALRHMARHRGWRNPYRQVDSLISDNPYSKQYGELKEKAKAYNDDATAAEEESTPAQLVVAMLDAGYAEAPRLRWRTGSKKPDAEGYLPVRLMQEDNANELKQIFRVQRVPADEWKPLFRSVFYAVSPKGSAEQRVGQDPLAPEQARALKASLAFQEYRIANVITNLRIKDASAELRKLTVDEKQSIYDQLVSPSSEDITWSDLCDFLGFKRSQLKGVGSLTEDGEERISSRPPRLTSVQRIYESDNKIRKPLVAWWKSASDNEHEAMIRLLSNTVDIDKVREDVAYASAIEFIDGLDDDALTKLDSVDLPSGRAAYSVETLQKLTRQMLTTDDDLHEARKTLFNVTDSWRPPADPIGEPLGNPSVDRVLKNVNRYLMNCQQRWGNPVSVNIEHVRSSFSSVAFARKDKREYEKNNEKRSIFRSSLSEQLRADEQMEKVRESDLRRLEAIQRQNGQCLYCGRTITFRTCEMDHIVPRKGVGSTNTRTNFAAVCAECNRMKSNTPFAIWARSEDAQTRGVSLAEAKKRVTMFTFNPKSYAPREVKAFKQAVIARLQQTEDDAAIDNRSIESVAWMADELHRRIDWYFNAKQYVNSASIDDAEAETMKTTVSVFQGRVTASARRAAGIEGKIHFIGQQSKTRLDRRHHAVDASVIAMMNTAAAQTLMERESLRESQRLIGLMPGERSWKEYPYEGTSRYESFHLWLDNMDVLLELLNDALDNDRIAVMQSQRYVLGNSIAHDATIHPLEKVPLGSAMSADLIRRASTPALWCALTRLPDYDEKEGLPEDSHREIRVHDTRYSADDEMGFFASQAAQIAVQEGSADIGSAIHHARVYRCWKTNAKGVRKYFYGMIRVFQTDLLRACHDDLFTVPLPPQSISMRYGEPRVVQALQSGNAQYLGSLVVGDEIEMDFPVSMLMVRLASIYNSSRSLVEGTLHGNIGLLMDSLTRRS

SEQ ID NO: 316 - protein, 166 aa, Bifidobacterium longum
MGLAAVEVSDENSPVRLLNAQSVIHDGGVDPQKNKEAITRKNMSGVARRTRRMRRRKRERLHKLDMLLGKFGYPVIEPESLDKPFEEWHVRAELATRYIEDDELRRESISIALRHMARHRGWRNPYRQVDSLISDNPYSKQYGELKEKAKAYNDDATAAEEESTPA

SEQ ID NO: 317 - protein, 1138 aa, Bifidobacterium longum
MNSVGLAAVEVSDENSPVRLLNAQSVIHDGGVDPQKNKEAITRKNMSGVARRTRRMRRRKRERLHKLDMLLGKFGYPVIEPESLDKPFEEWHVRAELATRYIEDDELRRESISIALRHMARHRGWRNPYRQVDSLISDNPYSKQYGELKEKAKAYNDDATAAEEESTPAQLVVAMLDAGYAEAPRLRWRTGSKKPDAEGYLPVRLMQEDNANELKQIFRVQRVPADEWKPLFRSVFYAVSPKGSAEQRVGQDPLAPEQARALKASLAFQEYRIANVITNLRIKDASAELRKLTVDEKQSIYDQLVSPSSEDITWSDLCDFLGFKRSQLKGVGSLTEDGEERISSRPPRLTSVQRIYESDNKIRKPLVAWWKSASDNEHEAMIRLLSNTVDIDKVREDVAYASAIEFIDGLDDDALTKLDSVDLPSGRAAYSVETLQKLTRQMLTTDDDLHEARKTLFNVTDSWRPPADPIGEPLGNPSVDRVLKNVNRYLMNCQQRWGNPVSVNIEHVRSSFSSVAFARKDKREYEKNNEKRSIFRSSLSEQLRADEQMEKVRESDLRRLEAIQRQNGQCLYCGRTITFRTCEMDHIVPRKGVGSTNTRTNFAAVCAECNRMKSNTPFAIWARSEDAQTRGVSLAEAKKRVTMFTFNPKSYAPREVKAFKQAVIARLQQTEDDAAIDNRSIESVAWMADELHRRIDWYFNAKQYVNSASIDDAEAETMKTTVSVFQGRVTASARRAAGIEGKIHFIGQQSKTRLDRRHHAVDASVIAMMNTAAAQTLMERESLRESQRLIGLMPGERSWKEYPYEGTSRYESFHLWLDNMDVLLELLNDALDNDRIAVMQSQRYVLGNSIAHDATIHPLEKVPLGSAMSADLIRRASTPALWCALTRLPDYDEKEGLPEDSHREIRVHDTRYSADDEMGFFASQAAQIAVQEGSADIGSAIHHARVYRCWKTNAKGVRKYFYGMIRVFQTDLLRACHDDLFTVPLPPQSISMRYGEPRVVQALQSGNAQYLGSLVVGDEIEMDFSSLDVDGQIGEYLQFFSQFSGGNLAWKHWVVDGFFNQTQLRIRPRYLAAEGLAKAFSDDVVPDGVQKIVTKQGWLPPVNTASKTAVRIVRRNAFGEPRLSSAHHMPCSWQWRHE

SEQ ID NO: 318 - protein, 182 aa, Bifidobacterium longum
MRGKRYRIGIDVGLNSVGLAAVEVSDENSPVRLLNAQSVIHDGGVDPQKNKEAITRKNMSGVARRTRRMRRRKRERLHKLDMLLGKFGYPVIEPESLDKPFEEWHVRAELATRYIEDDELRRESISIALRHMARHRGWRNPYRQVDSLISDNPYSKQYGELKEKAKAYNDDATAAEEESTPA

SEQ ID NO: 319 - protein, 441 aa, Bifidobacterium longum
MVAMLDAGYAEAPRLRWRTGSKKPDAEGYLPVRLMQEDNANELKQIFRVQRVPADEWKPLFRSVFYAVSPKGSAEQRVGQDPLAPEQARALKASLAFQEYRIANVITNLRIKDASAELRKLTVDEKQSIYDQLVSPSSEDITWSDLCDFLGFKRSQLKGVGSLTEDGEERISSRPPRLTSVQRIYESDNKIRKPLVAWWKSASDNEHEAMIRLLSNTVDIDKVREDVAYASAIEFIDGLDDDALTKLDSVDLPSGRAAYSVETLQKLTRQMLTTDDDLHEARKTLFNVTDSWRPPADPIGEPLGNPSVDRVLKNVNRYLMNCQQRWGNPVSVNIEHVRSSFSSVAFARKDKREYEKNNEKRSIFRSSLSEQLRADEQMEKVRESDLRRLEAIQRQNGQCLYCGRTITFRTCEMDHIVPRKGVGSTNTRTNFAAVCAECNRM

SEQ ID NO: 320 - protein, 967 aa, Bifidobacterium longum
MVAMLDAGYAEAPRLRWRTGSKKPDAEGYLPVRLMQEDNANELKQIFRVQRVPADEWKPLFRSVFYAVSPKGSAEQRVGQDPLAPEQARALKASLAFQEYRIANVITNLRIKDASAELRKLTVDEKQSIYDQLVSPSSEDITWSDLCDFLGFKRSQLKGVGSLTEDGEERISSRPPRLTSVQRIYESDNKIRKPLVAWWKSASDNEHEAMIRLLSNTVDIDKVREDVAYASAIEFIDGLDDDALTKLDSVDLPSGRAAYSVETLQKLTRQMLTTDDDLHEARKTLFNVTDSWRPPADPIGEPLGNPSVDRVLKNVNRYLMNCQQRWGNPVSVNIEHVRSSFSSVAFARKDKREYEKNNEKRSIFRSSLSEQLRADEQMEKVRESDLRRLEAIQRQNGQCLYCGRTITFRTCEMDHIVPRKGVGSTNTRTNFAAVCAECNRMKSNTPFAIWARSEDAQTRGVSLAEAKKRVTMFTFNPKSYAPREVKAFKQAVIARLQQTEDDAAIDNRSIESVAWMADELHRRIDWYFNAKQYVNSASIDDAEAETMKTTVSVFQGRVTASARRAAGIEGKIHFIGQQSKTRLDRRHHAVDASVIAMMNTAAAQTLMERESLRESQRLIGLMPGERSWKEYPYEGTSRYESFHLWLDNMDVLLELLNDALDNDRIAVMQSQRYVLGNSIAHDATIHPLEKVPLGSAMSADLIRRASTPALWCALTRLPDYDEKEGLPEDSHREIRVHDTRYSADDEMGFFASQAAQIAVQEGSADIGSAIHHARVYRCWKTNAKGVRKYFYGMIRVFQTDLLRACHDDLFTVPLPPQSISMRYGEPRVVQALQSGNAQYLGSLVVGDEIEMDFSSLDVDGQIGEYLQFFSQFSGGNLAWKHWVVDGFFNQTQLRIRPRYLAAEGLAKAFSDDVVPDGVQKIVTKQGWLPPVNTASKTAVRIVRRNAFGEPRLSSAHHMPCSWQWRHE

SEQ ID NO: 321 - protein, 1151 aa, Bifidobacterium sp.
MRGKRYRIGIDVGLNSVGLAAVEVSDENSPVRLLNAQSVIHDGGVDPQKNKEAITRKNMSGVARRTRRMRRRKRERLHKLDMLLGKFGYPVIEPESLDKPFEEWHVRAELATRYIEDDELRRESISIALRHMARHRGWRNPYRQVDSLISDNPYSKQYGELKEKAKAYNDDATAAEEESTPAQLVVAMLDAGYAEAPRLRWRTGSKKPDAEGYLPVRLMQEDNANELKQIFRVQRVPADEWKPLFRSVFYAVSPKGSAEQRVGQDPLAPEQARALKASLAFQEYRIANVITNLRIKDASAELRKLTVDEKQSIYDQLVSPSSEDITWSDLCDFLGFKRSQLKGVGSLTEDGEERISSRPPRLTSVQRIYESDNKIRKPLVAWWKSASDNEHEAMIRLLSNTVDIDKVREDVAYASAIEFIDGLDDDALTKLDSVDLPSGRAAYSVETLQKLTRQMLTTDDDLHEARKTLFNVTDSWRPPADPIGEPLGNPSVDRVLKNVNRYLMNCQQRWGNPVSVNIEHVRSSFSSVAFARKDKREYEKNNEKRSIFRSSLSEQLRADEQMEKVRESDLRRLEAIQRQNGQCLYCGRTITFRTCEMDHIVPRKGVGSTNTRTNFAAVCAECNRMKSNTPFAIWARSEDAQTRGVSLAEAKKRVTMFTFNPKSYAPREVKAFKQAVIARLQQTEDDAAIDNRSIESVAWMADELHRRIDWYFNAKQYVNSASIDDAEAETMKTTVSVFQGRVTASARRAAGIEGKIHFIGQQSKTRLDRRHHAVDASVIAMMNTAAAQTLMERESLRESQRLIGLMPGERSWKEYPYEGTSRYESFHLWLDNMDVLLELLNDALDNDRIAVMQSQRYVLGNSIAHDATIHPLEKVPLGSAMSADLIRRASTPALWCALTRLPDYDEKEGLPEDSHREIRVHDTRYSADDEMGFFASQAAQIAVQEGSADIGSAIHHARVYRCWKTNAKGVRKYFYGMIRVFQTDLLRACHDDLFTVPLPPQSISMRYGEPRVVQALQSGNAQYLGSLVVGDEIEMDFSSLDVDGQIGEYLQFFSQFSGGNLAWKHWVVDGFFNQTQLRIRPRYLAAEGLAKAFSDDVVPDGVQKIVTKQGWLPPVNTASKTAVRIVRRNAFGEPRLSSAHHMPCSWQWRHE

SEQ ID NO: 322 - protein, 1092 aa, Brevibacillus laterosporus
MAYTMGIDVGIASCGWAIVDLERQRIIDIGVRTFEKAENPKNGEALAVPRREARSSRRRLRRKKHRIERLKYMFVRNGLAVDIQHLEQTLRSQNEIDVWQLRVDGLDRMLTQKEWLRVLIHLAQRRGFQSNRKTDGSSEDGQVLVNVTENDRLMEEKDYRTVAEMMVKDEKFSDHKRNKNGNYHGVVSRASLLVEIHTLFESQRQHHNFLASKDFELEYINIWSSQRPVATKDQIEKMIGTCTFLPKEKRAPKASWHFQYFMLLQTINHIRITNAQGTRPLNKEEIEQVVNMALTKSKVSYHDIRKVLDLSEEYQFVGLDYGKEDEKKKVESKETIIKLDDYHKLNKIFNEVELAKGETWEAVDYDTVAYALTFFKDDEDIRDYLQNKYKDSKNRLVKNVANKEYTNELIEKVSTLSFRKVGHLSLKALRKIIPFLEQGMTYDKACQAAGFNFQGISKKKRSVVLPVIDQISNPVVNRALTQTRKVINALIKKYGSPETIHIETARELSKRFDERKNITKDYKENRDKNERAKKHLSELGIINPTGLDIVKYKLWCEQQGRCMYSNQPISFERLRESGYTEVDHIIPYSRSMNDSYNNRVLVMTRENREKSNQTPYEYMGNDTQRWDEFEQRVTTNPQIKKEKRQNLLLKGFTNRRELEMLERNLNDTRHITKYLSHFISTNLEFSPSDKKKKVVNTSGRITSHLRSRWGLEKNREQNDLHHAMDAVVIAVTSDSFIQQVTNYYKRKERRELNGDDKFPLPWKFFREEVIARLSPNPKEQIEALPNHFYSEDELADLQPIFVSRMPKRSITGEAHQAQFRRVVGKTKEGKNITAKKTALVDISYDKNGDFNMYGRETDPATYEAIKERYLEFGGNAKKAFSTDLHKPKKDGTKGPLIKSVRIMENKTLVHPVNKGKGVVYNSSIVRTDVFQRKEKYYLLPVYVTDVTKGKLPNKVIAAKKGYDDWIEVDDSFTFLYSLYPNDLIFIRQNPKKKISLKKRIESHSISDSKEVQEILTYYKGVDSSTAAIEFITHDGSYYAKGVGVQNLDCFEKYQVDILGNYSKVKGEKRLELETSDNNHKGKDVNSIKSTSR

SEQ ID NO: 323 - protein, 103 aa, Butyrivibrio fibrisolvens
MISVGQSRKDLEDLGYEFKLSFYKEDIIEYEKNGDILVERFLSRTMPQVRNYIETKPIDRPKYDKRNPVGLSKTSSIRKITMDILGNRFYVDKMSFNNVVGTQ

SEQ ID NO: 324 - protein, 177 aa, Butyrivibrio fibrisolvens
MLIAFSQMGYDAYHELTNKYIDFETGEIIDKEGFNELLNNDLVYKNTMYESKWLKIKGNIEKAAEKNKYWYQVNKKCNRGLCNQTVYGTRESDGDVYKISKIDIRTDDGFKKFKNIVDKGNESVFLMYENDPKTFELIMDIYKNYSDSKNPFVQYEKETGDIIRKYSKKITGQRFLN

SEQ ID NO: 325 - protein, 1442 aa, Caenispirillum salinarum
MPVLSPLSPNAAQGRRRWSLALDIGEGSIGWAVAEVDAEGRVLQLTGTGVTLFPSAWSNENGTYVAHGAADRAVRGQQQRHDSRRRRLAGLARLCAPVLERSPEDLKDLTRTPPKADPRAIFFLRADAARRPLDGPELFRVLHHMAAHRGIRLAELQEVDPPPESDADDAAPAATEDEDGTRRAAADERAFRRLMAEHMHRHGTQPTCGEIMAGRLRETPAGAQPVTRARDGLRVGGGVAVPTRALIEQEFDAIRAIQAPRHPDLPWDSLRRLVLDQAPIAVPPATPCLFLEELRRRGETFQGRTITREAIDRGLTVDPLIQALRIRETVGNLRLHERITEPDGRQRYVPRAMPELGLSHGELTAPERDTLVRALMHDPDGLAAKDGRIPYTRLRKLIGYDNSPVCFAQERDTSGGGITVNPTDPLMARWIDGWVDLPLKARSLYVRDVVARGADSAALARLLAEGAHGVPPVAAAAVPAATAAILESDIMQPGRYSVCPWAAEAILDAWANAPTEGFYDVTRGLFGFAPGEIVLEDLRRARGALLAHLPRTMAAARTPNRAAQQRGPLPAYESVIPSQLITSLRRAHKGRAADWSAADPEERNPFLRTWTGNAATDHILNQVRKTANEVITKYGNRRGWDPLPSRITVELAREAKHGVIRRNEIAKENRENEGRRKKESAALDTFCQDNTVSWQAGGLPKERAALRLRLAQRQEFFCPYCAERPKLRATDLFSPAETEIDHVIERRMGGDGPDNLVLAHKDCNNAKGKKTPHEHAGDLLDSPALAALWQGWRKENADRLKGKGHKARTPREDKDFMDRVGWRFEEDARAKAEENQERRGRRMLHDTARATRLARLYLAAAVMPEDPAEIGAPPVETPPSPEDPTGYTAIYRTISRVQPVNGSVTHMLRQRLLQRDKNRDYQTHHAEDACLLLLAGPAVVQAFNTEAAQHGADAPDDRPVDLMPTSDAYHQQRRARALGRVPLATVDAALADIVMPESDRQDPETGRVHWRLTRAGRGLKRRIDDLTRNCVILSRPRRPSETGTPGALHNATHYGRREITVDGRTDTVVTQRMNARDLVALLDNAKIVPAARLDAAAPGDTILKEICTEIADRHDRVVDPEGTHARRWISARLAALVPAHAEAVARDIAELADLDALADADRTPEQEARRSALRQSPYLGRAISAKKADGRARAREQEILTRALLDPHWGPRGLRHLIMREARAPSLVRIRANKTDAFGRPVPDAAVWVKTDGNAVSQLWRLTSVVTDDGRRIPLPKPIEKRIEISNLEYARLNGLDEGAGVTGNNAPPRPLRQDIDRLTPLWRDHGTAPGGYLGTAVGELEDKARSALRGKAMRQTLTDAGITAEAGWRLDSEGAVCDLEVAKGDTVKKDGKTYKVGVITQGIFGMPVDAAGSAPRTPEDCEKFEEQYGIKPWKAKGIPLA

SEQ ID NO: 326 - protein, 984 aa, Campylobacter coli
MARILAFDIGISSIGWAFSENDELKDCGVRIFTKAENPKTGESLALPRRLARSARKCLARRKARLNHLKHLIANEFKLNYEDYQSFDESLAKAYKGSLISPYELRFRALNELLSKQDFARVILHIAKRRGYDDIKNNGDEEKSEILKAIKQNEEKLVNYQSVGEYLYKEYFQKFKENSKEFINVRNKKESYERCIAQSFLKDELKLIFQKQREFGFSFSKKFEEEVLSVAFYKRALKDFSHLVGNCSFFTDEKRAPKNSPLAFMFVALTRIINLLNNLKNTEGILYTKDDLNALLNEVLKNGTLTYKQTKKLLGLSDDYEFKGEKGTYFIEFKKYKEFIKALGEHNLSQDDLNEIAKDITLIKDEIKLKKALAKYDLNQNQIDSLSKLEFKDHLNISFKALKLITPLMLEGKKYDEACNELNLKVAINEDKKDFLPAFNETYYKDEVTNPVVLRAIKEYRKVLNALLKKYGKVHKINIELAREVGKNHSQRAKIEKEQNENYKAKKDAELECEKLGLKINSKNILKLRLFKEQKEFCAYSGEKIKISDLQDEKMLEIDHIYPYSRSFDDSYMNKVLVFTKQNQEKLNQTPFEAFGNDSAKWQKIEVLAKNLPTKKQKRILDKNYKDKEQKNFKDRNLNDTRYIARLVLNYTKDYLDFLPLSDDENTKLNDTQKGSKVHVEAKSGMLTSALRHTWGFSAKDRNNHLHHAIDAVIIAYANNSIVKAFSDFKKEQESNSAELYAKKISELDYKNKRKFFEPFSGFRQKVLDKIDEIFVSKPERKKPSGALHEETFRKEEEFYQSYGGKEGVLKALELGKIRKVNGKIVKNGDMFRVDIFKHKKTNKFYAVPIYTMDFALKVLPNKAVARSKKGEIKDWILMDENYEFCFSLYKDSLILIQTKDMQEPEFVYYNAFTSSTVSLIVSKHDNKFETLSKNQKILFKNANEKEVIAKSIGIQNLKVFEKYIVSALGEVTKAEFRQREDFKK

SEQ ID NO: 327 - protein, 984 aa, Campylobacter coli
MARILAFDIGISSIGWAFSENDELKDCGVRIFTKAENPKTGESLALPRRLARSARKRLARRKARLNHLKHLIANEFKLNYEDYQSFDESLAKAYKGSLISPYELRFRALNELLSKQDFARVILHIAKRRGYDDIKNNGDEEKGKILKAIKQNEEKLVNYQSVGEYLYKEYFQKFKENSKEFINVRNKKESYERCITQSFLKYELKLIFQKQREFGFSFSKKFEEEVLSVAFYKRALKDFSHLVGNCSFFSDEKRAPKNSPLAFMFVALTRIINLLNNLKNTEGILYTKDDLNALLNEVLKNGTLTYKQTKKLLGLSDDYEFKGEKGTYFIEFKKYKEFIKALGEHNLSQDDLNEIAKDITLIKDEIKLKKALAKYDLNQNQIDSLSKLEFKDHLNISFKALKLITPLMLEGKKYDEACNELNLKVAINEDKKDFLPAFNETYYKDEVTNPVVLRAIKEYRKVLNALLKKYGKVHKINIELAREVGKNYSQRAKIEKEQNENYKAKKDAELECEKLGLKINSKNILKLRLFKEQKEFCAYSGEKIKISDLQDEKMLEIDHIYPYSRSFDDSYMNKVLVFTKQNQEKLNQTPFEAFGNDSAKWQKIEVLAKNLPTKKQKRILDKNYKDKEQKNFKDRNLNDTRYIARLVLNYTKDYLDFLPLSDDENTKLNDTQKGSKVHVEAKSGMLTSALRHTWGFSAKDRNNHLHHAIDAVIIAYANNSIVKAFSDFKKEQESNSAELYAKKISELDYKNKRKFFEPFSGFRQKVLDKIDEIFVSKPERKKPSGALHEETFRKEEEFYQSYGGKEGVLKALELGKIRKVNGKIVKNGDMFRVDIFKHKKTNKFYAVPIYTMDFALKVLPNKAVARSKKGEIKDWILMDENYEFCFSLYKDSLILIQTKDMQEPEFVYYNAFTSSTVSLIVSKHDNKFETLSKNQKILFKNANEKEVIAKSIGIQNLKVFEKYIVSALGEVTKAEFRQREDFKK

SEQ ID NO: 328 - protein, 984 aa, Campylobacter coli
MARILAFDIGISSIGWAFSENDELKDCGVRIFTKAENPKTGESLALPRRLARSARKRLARRKARLNHLKHLIANEFKLNYEDYQSFDESLAKAYKGSLISPYELRFRALNELLSKQDFARVILHIAKRRGYDDIKNNGDEEKSEILKAIKQNEEKLVNYQSVGEYLYKEYFQKFKENSKEFINVRNKKESYERCIAQSFLKDELKLIFQKQREFGFSFSKKFEEEVLSVAFYKRALKDFSHLVGNCSFFTDEKRAPKNSPLAFMFVALTRIINLLNNLKNTEGILYTKDDLNTLLNEVLKNGTLTYKQTKKLLGLSDDYEFKGEKGTYFIEFKKYKEFIKALGEHNLSQDNLNEIAKDITLIKDEIKLKKALAKYDLNQNQIDSLSKLEFKDHLNISFKALKLITPLMLEGKKYDEAYNELNLKVAINEDKKDFLPAFNETYYKDEVTNPVVLRAIKEYRKVLNALLKKYGKVHKINIELAREVGKNHSQRAKIEKEQNENYKAKKDAELECEKLGLKINSKNILKLRLFKEQKEFCAYSGEKIKISDLQDEKMLEIDHIYPYSRSFDDSYMNKVLVFTKQNQEKLNQTPFEAFGNDSAKWQKIEVLAKNLPTKKQKRILDKNYKDKEQKDFKDRNLNDTRYIARLVLNYTKDYLDFLPLSDDENTKLNDTQKGSKVHVEAKSGMLTSALRHTWGFSAKDRNNHLHHAIDAVIIAYANNSIVKAFSDFKKEQESNSAELYAKKISELDYKNKRKFFEPFSGFRQKVLDKIDEIFVSKPERKKPSGALHEETFRKEEEFYQSYGGKEGVLKALELGKIRKVNGKIVKNGDMFRVDIFKHKKTNKFYAVPIYTMDFALKVLPNKAVARSKKGEIKDWILMDENYEFCFSLYKDSLILIQTKDMQEPELVYFNAFTSSTVSLIVSKHDNKFETLSKNQKILFKNANEKEVIAKSIGIQNLKVFEKYIVSALGEVTKAEFRQREDFKK

SEQ ID NO: 329 - protein, 984 aa, Campylobacter coli
MARILAFDIGISSIGWAFSENDELKDCGVRIFTKAENPKTGESLALPRRLARSARKRLARRKARLNHLKHLIANEFKLNYEDYQSFDESLAKAYKGSLISPYELRFRALNELLSKQDFARVILHIAKRRGYDDIKNNGDEEKSEILKAIKQNEEKLVNYQSVGEYLYKEYFQKFKENSKEFINVRNKKESYERCIAQSFLKDELKLIFQKQREFGFSFSKKFEEEVLSVAFYKRALKDFSHLVGNCSFFTDEKRAPKNSPLAFMFVALTRIINLLNNLKNTEGILYTKDDLNALLNEVLKNGTLTYKQTKKLLGLSDDYEFKGEKGTYFIEFKKYKEFIKALGEHNLSQDDLNEIAKDITLIKDEIKLKKALAKYDLNQNQIDSLSKLEFKDHLNISFKALKLITPLMLEGKKYDEACNELNLKVAINEDKKDFLPAFNETYYKDEVTNPVVLRAIKEYRKVLNALLKKYGKVHKINIELAREVGKNYSQRAKIEKEQNENYKAKKDAELECEKLGLKINSKNILKLRLFKEQKEFCAYSGEKIKISDLQDEKMLEIDHIYPYSRSFDDSYMNKVLVFTKQNQEKLNQTPFEAFGNDSAKWQKIEVLAKNLPTKKQKRILDKNYKDKEQKNFKDRNLNDTRYIARLVLNYTKDYLDFLPLSDDENTKLNDTQKGSKVHVEAKSGMLTSALRHTWGFSAKDRNNHLHHAIDAVIIAYANNSIVKAFSDFKKEQESNSAELYAKKISELDYKNKRKFFEPFSGFRQKVLDKIDEIFVSKPERKKPSGALHEETFRKEEEFYQSYGGKEGVLKALELGKIRKVNGKIVKNGDMFRVDIFKHKKTNKFYAVPIYTMDFALKVLPNKAVARSKKGEIKDWILMDENYEFCFSLYKDSLILIQTKDMQEPEFVYYNAFTSSTVSLIVSKHDNKFETLSKNQKILFKNANEKEVIAKSIGIQNLKVFEKYIVSALGEVTKAEFRQREDFKK

SEQ ID NO: 330 - protein, 987 aa, Campylobacter coli
MARILAFDIGISSIGWAFSENDELKDCGVRIFTKAENPKTGESLALPRRLARSARKRLARRKARLNHLKHLIANEFKLNYEDYQSFDESLAKAYKGSLISPYELRFRALNELLSKQDFARVILHIAKRRGYDDIKNNGDEEKSEILKAIKQNEEKLVNYQSVGEYLYKEYFQKFKENSKEFINVRNKKESYERCIAQSFLKDELKLIFQKQREFGFSFSKKFEEEVLSVAFYKRALKDFSHLVGNCSFFTDEKRAPKNSPLAFMFVALTRIINLLNNLKNTEGILYTKDDLNTLLNEVLKNGTLTYKQTKKLLGLSDDYEFKGEKGTYFIEFKKYKEFIKALGEHNLSQDNLNEIAKDITLIKDEIKLKKALAKYDLNQNQIDSLSKLEFKDHLNISFKALKLITPLMLEGKKYDEAYNELNLKVAINEDKKDFLPAFNETYYKDEVTNPVVLRAIKEYRKVLNALLKKYGKVHKINIELAREVGKNHSQRAKIEKEQNENYKAKKDAELECEKLGLKINSKNILKLRLFKEQKEFCAYSGEKIKISDLQDEKMLEIDHIYPYSRSFDDSYMNKVLVFTKQNQEKLNQTPFEAFGNDSAKWQKIEVLAKNLPTKKQKRILDKNYKDKEQKDFKDRNLNDTRYIARLVLNYTKDYLDFLPLSDDENTKLNDTQKGSKVHVEAKSGMLTSALRHTWGFSAKDRNNHLHHAIDAVIIAYANNSIVKAFSDFKKEQESNSAELYAKKISELDYKNKRKFFEPFSGFRQKVLDKIDEIFVSKPERKKPSGALHEETFRKEEEFYQSYGGKEGVLKALELGKIRKVNGKIVKNGDMFRVDIFKHKKTNKFYAVPIYTMDFALKVLPNKAVARSKKGEIKDWILMDENYEFCFSLYKDSLILIQTKDMQEPELVYFNAFTSSTVSLIVSKHDNKFETLSKNQKILFKNANEKEVIAKSIGIQNLKVFEKYIVSALGEVTKAEFRQREDFKNELR

SEQ ID NO: 331 - protein, 984 aa, Campylobacter coli
MARILAFDIGISSIGWAFSENDELKDCGVRIFTKAENPKTGESLALPRRLARSARKRLARRKARLNHLKHLIANEFKLNYEDYQSFDESLAKAYKGSLISPYELRFRALNELLSKQDFARVILHIAKRRGYDDIKNNGDEEKSEILKAIKQNEEKLVNYQSVGEYLYKEYFQKFKENSKEFINVRNKKESYERCIAQSFLKDELKLIFQKQREFGFSFSKKFEEEVLSVAFYKRALKDFSHLVGNCSFFTDEKRAPKNSPLAFMFVALTRIINLLNNLKNTEGILYTKDDLNTLLNEVLKNGTLTYKQTKKLLGLSDDYEFKGEKGTYFIEFKKYKEFIKALGEHNLSQDNLNEIAKDITLIKDEIKLKKALAKYDLNQNQIDSLSKLEFKDHLNISFKALKLITPLMLEGKKYDEAYNELNLKVAINEDKKDFLPAFNETYYKDEVTNPVVLRAIKEYRKVLNALLKKYGKVHKINIELAREVGKNHSQRAKIEKEQNENYKAKKDAELECEKLGLKINSKNILKLRLFKEQKEFCAYSGEKIKISDLQDEKMLEIDHIYPYSRSFDDSYMNKVLVFTKQNQEKLNQTPFEAFGNDSAKWQKIEVLAKNLPTKKQKRILDKNYKDKEQKDFKDRNLNDTRYIARLVLNYTKDYLDFLPLSNDENTKLNDTQKGSKVHVEAKSGMLTSALRHTWGFSAKDRNNHLHHAIDAVIIAYANNSIVKAFSDFKKEQESNSAELYAKKISELDYKNKRKFFEPFSGFRQKVLDKIDEIFVSKPERKKPSGALHEETFRKEEEFYQSYGGKEGVLKALELGKIRKVNGKIVKNGDMFRVDIFKHKKTNKFYAVPIYTMDFALKVLPNKAVARSKKGEIKDWILMDENYEFCFSLYKDSLILIQTKDMQEPELVYFNAFTSSTVSLIVSKHDNKFETLSKNQKILFKNANEKEVIAKSIGIQNLKVFEKYIVSALGEVTKAEFRQREDFKK

SEQ ID NO: 332 - protein, 987 aa, Campylobacter coli
MARILAFDIGISSIGWAFSENDELKDCGVRIFTKAENPKTGESLALPRRLARSARKRLARRKARLNHLKHLIANEFKLNYEDYQSFDESLAKAYKGSLISPYELRFRALNELLSKQDFARVILHIAKRRGYDDIKNSDDKEKGAILKAIKQNEEKLANYQSVGEYLYKEYFQKFKENSKEFTNVRNKKESYERCIAQSFLKDELKLIFKKQREFGFSFSKKFEEEVLSVAFYKRALKDFSHLVGNCSFFTDEKRAPKNSPLAFMFVALTRIINLLNNLKNTEGILYTKDDLNALLNEVLKNGTLTYKQTKKLLGLSDDYEFKGEKGTYFIEFKKYKEFIKALGDHSLSQDDLNEIAKDITLIKDEIKLKKALAKYDLNQNQIDSLSKLEFKDHLNISFKALKLITPLMLEGKKYDEACNELNLKVAINEDKKDFLPAFNETYYKDEVTNPVVLRAIKEYRKVLNALLKKYGKVHKINIELAREVGKNYSQRAKIEKEQNENYKAKKDAELECEKLGLKINSKNILKLRLFKEQKEFCAYSGEKIKISDLQDEKMLEIDHIYPYSRSFDDSYMNKVLVFTKQNQEKLNKTPFEAFGNDSTKWQKIEVLAKNLPEKKQKRILDKNYKDKEQKDFKDRNLNDTRYIARLVLNYTKDYLDFLPLSDDENTKLNDTQKGSKVHVEAKSGMLTSALRHTWGFSTKDRNNHLHHAIDAVIIAYANNSIVKAFSDFKKEQESNSAELYAKKISELDYKNKRKFFEPFSGFRQKVLDKIDEIFVSKPERKKPSGALHEETFRKEEEFYQSYGGKEGVLKALELGKIRKVNGKIVKNGDMFRVDIFKHKKTNKFYAVPIYTMDFALKVLPNKAVARSKKGEIKDWILMDENYEFCFSLYKDSLILIQTKDMQEPEFVYYNAFTSSTVSLIVSKHDNKFETLSKNQKILFKNANEKEVIAKSIGIQNLKVFEKYIVSALGEVTKAEFRQREDFKNELR

SEQ ID NO: 333 - protein, 984 aa, Campylobacter coli
MARILAFDIGISSIGWAFSENDELKDCGVRIFTKAENPKTGESLALPRRLARSARKRLARRKARLNHLKHLIANEFKLNYEDYQSFDESLAKAYKGSLISPYELRFRALNELLSKQDFARVILHIAKRRGYDDIKNSDDKEKGAILKAIKQNEEKLTNYQSVGEYLYKEYFQKFKENSKEFTNVRNKKESYERCIAQSFLKDELKLIFKKQREFGFSFSKKFEEEVLSVAFYKRALKDFSHLVGNCSFFTDEKRAPKNSPLAFMFVALTRIINLLNNLKNTEGILYTKDDLNALLNEVLKNGTLTYKQTKKLLGLSDDYEFKGEKGTYFIEFKKYKEFIKALGDHSLSQDDLNEIAKDITLIKDEIKLKKALAKYDLNQNQIDSLSKLEFKDHLNISFKALKLITPLMLEGKKYDEACNELNLKVAINEDKKDFLPAFNETYYKDEVTNPVVLRAIKEYRKVLNALLKKYGKVHKINIELAREVGKNYSQRAKIEKEQNENYKAKKDAELECEKLGLKINSKNILKLRLFKEQKEFCAYSGEKIKISDLQDEKMLEIDHIYPYSRSFDDSYMNKVLVFTKQNQEKLNQTPFEAFGNDSAKWQKIEVLAKNLPTKKQKRILDKNYKDKEQKDFKDRNLNDTRYIARLVLNYTKDYLDFLPLSDDENTKLNDTQKGSKVHVEAKSGMLTSALRHTWGFSAKDRNNHLHHAIDAVIIAYANNSIVKAFSDFKKEQESNSAELYAKKISELDYKNKRKFFEPFSGFRQKVLDKIDEIFVSKPERKKPSGALHEETFRKEEEFYQSYGGKEGVLKALELGKIRKVNGKIVKNGDMFRVDIFKHKKTNKFYAVPIYTMDFALKVLPNKAVARSKKGEIKDWILMDENYEFCFSLYKDSLILIQTKDMQEPEFVYYNAFTSSTVSLIVSKHDNKFETLSKNQKILFKNANEKEVIAKSIGIQNLKVFEKYIVSALGEVTKAEFRQREDFKK

SEQ ID NO: 334 - protein, 965 aa, Campylobacter coli
MKIIGFNLGIANIGWALRENDEIIDCGVRVFDIPENPKNGNSLALERRENKARMKIVKRKKARMLATKTFLKKELNVDLSKLFLIGSTQSIYELRTKALSSLISKEELSAIILHIAKHRGYDDSALKNENGTIIEALNKNKEAMLKFKSVGEYFYKNFVQNKEVKKIRNTTEDYSNSVPRSLLKQELDLILDKQKELGLIKNADFKAKLFEIIFFKRPLKDFSNKIGNCIFFENEKRAAKNTISACEFVALGKVVNLLKSIEKDIGIVYEKDSINEIMSIILDKTSISYKKIRDILNLPQDINFKGLDYSKNNVENSKLVDLKKLNEFKKALGDGFTNLDKDILDSIATDITLTKDTATLKEKLKNYNVLNAEQIEKLSELVFNDHINLSLKALKQIIPLMYEGKRYDEACELCNFTIAKNQEKNEYLPLFEKTRFAKDISSPVVIRAICEFRKLLNDIIRRYGSVHKIHLELTRDFGISFNDRKKIIKEIEQNEQSRIKALETIKELKLEETSKNIQIVRLFEDQKGICPYSGLKMDLKCLDELVIDYIRPYNRSLDDSYSNKVLTFKKLNDLKQGKTPFEAFGEDEKLWAEINERIKEYNGKKRFKIFDKFFKDKKPFDFTEQTLQDTRWLTKLVASYLNEYLSFLPISEDENTALGYGEKGSKQHVILSSGMITQMLRNFWYLGFKNHKDYKNNAMDAIIVAFTTNSIIFTFNNFKKELDLAKAEFYANKISESDYLLKRKFLPPFSGFKEQALEKVKNIFVSHSLKIKNKGTLHELTPLKIKELKNTYGDLDLAVKLGKIRKYNDKYYANAKGSLVRTDLFADKENKFHAVSIYKADFSTKKLPNKTPATTSNGETKEGIEMNENYNFCMSLYKNTPISVKIKGMKEPIICYYHGFNTSGSKITYKKHDNNYHNLSEDEMVVFRKNDKESIVVGKILEIKKYSISPSGELSLIENEERKWF

SEQ ID NO: 335 - protein, 965 aa, Campylobacter coli
MKIIGFNLGIANIGWALRENDEIIDCGVRVFDIPENPKNGNSLALERRENKARMKIVKRKKARMLATKTFLKKELNVDLSKLFLIGSTQSIYELRTKALSSLISKEELSAIILHIAKHRGYDDSALKNENGTIIEALNKNKEAMLKFKSVGEYFYKNFVQNKEVKKIRNTTEDYSNSVPRSLLKQELDLILDKQKELGLIKNADFKAKLFEIIFFKRPLKDFSNKIGNCIFFENEKRAAKNTISACEFVALGKVVNLLKSIEKDIGIVYEKDSINEIMSIILDKTSISYKKIRDILNLPQDINFKGLDYSKNNAENSKLVDLKKLNEFKKALGDGFANLDKDILDSIATDITLTKDTATLKEKLKNYNVLNAEQIEKLSELVFNDHINLSLKALKQIIPLMYEGKRYDEACELCNFTIAKNQEKNEYLPLFEKTRFAKDISSPVVIRAICEFRKLLNDIIRRYGSVHKIHLELTRDFGISFNDRKKIIKEIEQNEQSRIKALETIKELKLEETSKNIQIVRLFEDQKGICPYSGLKMDLKCLDELVIDYIRPYNRSLDDSYSNKVLTFKKLNDLKQGKTPFEAFGEDEKLWAEINERIKEYNGKKRFKIFDKFFKDKKPFDFTEQTLQDTRWLTKLVASYLNEYLSFLPISEDENTALGYGEKGSKQHVVLSSGMITQMLRNFWYLGFKNHKNYKNNAMDAIIVAFTTNSIIFAFNNFKKELDLAKAEFYANKISESDYLLKRKFLPPFSGFKEQALEKVKNIFVSHSLKIKNKGTLHELTPLKIKELKNTYGDLDLAVKLGKIRKYNDKYYANTKGSLVRTDLFVDKENKFHAVSIYKADFSTKKLPNKTPATTSNGETKEGIEMNENYNFCMSLYKNTPVSVKIKGMKEPIICYYHGFNTSGSKITYKKHDNNYHNLSEDEMVVFRKNDKESIVVGKILEIKKYSISPSGELSLIENEKRKWF

SEQ ID NO: 336 - protein, 965 aa, Campylobacter coli
MKIIGFNLGIANIGWALRENDEIIDCGVRVFDIPENPKNGNSLALERRENKARMKIVKRKKARMLATKTFLKKELNVDLSKLFLIGSTQSIYELRTKALSSLISKEELSAIILHIAKHRGYDDSALKNENGTIIEALNKNKEAMLKFKSVGEYFYKNFVQNKEVKKIRNTTEDYSNSVPRSLLKQELDLILDKQKELGLIKNADFKEKLFEIIFFKRPLKDFSNKIGNCIFFENEKRAAKNTISACEFVALGKVVNLLKSIEKDIGIVYEKDSINEIMSIILDKTSISYKKIRDILNLPQDINFKGLDYSKNNAENSKLVDLKKLNEFKKALGDGFANLDKDILDSIATDITLTKDTATLKEKLKNYNVLNAEQIEKLSELVFNDHINLSLKALKQIIPLMYEGKRYDEACELCNFTIAKNQEKNEYLPLFEKTRFAKDISSPVVIRAICEFRKLLNDIIRRYGSVHKIHLELTRDFGISFNDRKKIIKEIEQNEQSRIKALETIKELKLEETSKNIQIVRLFEDQKGICPYSGLKMDLKCLDELVIDYIRPYNRSLDDSYSNKILTFKKLNDLKQGKTPFEAFGEDEKLWAEINERIKEYNGKKRFKIFDKFFKDKKPFDFTEQTLQDTRWLTKLVASYLNEYLLFLPINEDENTALGYGEKGSKQHVVLSSGMITQMLRNFWYLGFKNHKDYKNNAMDAIIVAFTTNSIIFAFNNFKKELDLAKAEFYANKISESDYLLKRKFLPPFSGFKEQALEKVKNIFVSHSLKIKNKGTLHELTPLKIKELKNTYGDLDLAVKLGKIRKYNDKYYANAKGSLVRTDLFADKENKFHAVSIYKADFSTKKLPNKTPATTSNGETKEGIEMNENYNFCMSLYKNTPISVKIKGMKEPIICYYHGFNTSGSKITYKKHDNNYHNLSEDEMVVFRKNDKESIVVGKILEIKKYSISPSGELSLIENEERKWF

SEQ ID NO: 337 - protein, 933 aa, Campylobacter coli
MKIIGFNLGIANIGWALRENDEIIDCGVRVFDIPENPKNGNSLALERRENKARMKIVKRKKARMLATKTFLKKELNVDLSKLFLIGSTQSIYELRTKALSSLISKEELSVIILHIAKHRGYDDSALKNENGTIIEALNKNKETMLKFKSVGEYFYKNFVQNKEVKKIRNTTEDYSNSVPRSLLKQELDLILDRQKELGLIKNADFKAKLFEIIFFKRPLKDFSNKIGNCIFFENEKRAAKNTISACEFVALGKVVNLLKSIEKDIGIVYEKDSINEIMSIILDKTSISYKKIRDILNLPQDINFKGLDYSKNNVENSKLVDLKKLNEFKKALGDGFTNLDKDILDSIATDITLTKDTATLKEKLKNYNVLNAEQIEKLSELVFNDHINLSLKALKQIIPLMYEGKRYDEACELCNFTIAKNQEKNEYLPLFEKTRFAKDISSPVVIRAICEFRKLLNDIIRRYGSVHKIHLELTRDFGISFNDRKKIIKEIEQNEQSRIKALETIKELKLEETSKNIQIVRLFEDQKGICPYSGLKMDLKCLDELVIDYIRPYNRSLDDSYSNKVLTFKKLNDLKQGKTPFEAFGEDEKLWAEINERIKEYNGKKRFKIFDKFFKDKKPFDFTEQTLQDTRWLTKLVASYLNEHLSFLPISEDENTALGYGEKGSKQHVILSSGMITQMLRNFWYLGFKNHKDYKNNAMDAIIVAFTTNSIIFTFNNFKKELDLAKAEFYANKISESDYLLKRKFLPPFSGFKEQALEKVKNIFVSHSLKIKNKGTLHELTPLKIKELKNTYGDLDLAVKLGKIRKYNDKYYANANGSLVRSDLFIDKKNKFHAVPIYKADFSTKKLPNKTPATTSNGETKEGIEMNENYNFCMSLYKNTPISVKIKGMKESIICYYHGFNTSGSKITYKKHDNNYHNLSEDEMVVFRKNDKE

SEQ ID NO: 338 - protein, 666 aa, Campylobacter jejuni
KGEKGTYFIEFKKYKEFIKALDEHSLSQDDLNEIAKDITLIKDEIKLKKALAKYDLKENQIDSLSKLEFKDHLNISFKALKLITPLMLEGKKYDEACNELNLKVAINEDKKDFLPAFNETYYKDEVTNPVVLRAIKEYRKILNALLKKYGKVHKINIELAREVGKNHSQRAKIEKEQNENYKAKKDAELECEKLGLKINSKNILKLRLFKEQKEFCVYSGEKIKLSDLQDEKMLEIDHIYPYSRSFDDSYMNKVLVFAKQNQEKLNKTPFEAFGNDSTKWQKIEVLTKNLPTKKQKRILDKNYKDKEQKDFKDRNLNDTRYIARLVLNYTKDYLDFLPLSDDENTKLNDTQKGSKVHVEAKSGMLTSALRHTWGFSTKDRNNHLHHAIDAAIIAYANNSIVKAFSDFKKEQESNSAELYAKKISELDYKNKRKFFEPFSGFRQKVLDKIDEIFVSKPERKKPSGALHEETFRKEEEFYQSYGGKEGVLKALELGKIRKVNGKIVKNGDMFRVDIFKHKKTNKFYAVPIYTMDFALKVLPNKAVARSKKGEIKDWILMDEDYEFCFSLYKDSLILIQTKDMQEPELVYFNAFTSSTVSLIVSKHDNKFETLSKNQKILFKNANEKEVIAKSIGIQNLKVFEKYIVSALGEVTKAEFRQREDFKNELR

SEQ ID NO: 339 - protein, 190 aa, Campylobacter jejuni
MAFDIGISSIGWAFSENDELKDCGVRIFTKVENPKTGESLALPRRLARSARKRLARRKARLNHLKHLIANEFKLNYEDYQSFDESLAKAYKGSLISPYELRFRALNELLSKQDFARVILHIAKRRGYDDIKNSDDKEKGAILKAIKQNEEKLANYQSVGEYLYKEYFQKFKENSKEFTNVRNKKKVMNAA

SEQ ID NO: 340 - protein, 985 aa, Campylobacter jejuni
MAKILAFDIGISSIGWAFVENDELKDCGVRIFTKAENPKTGESLALPRRLARSARKRLARRKARLNHLKHLIANEFKLNYEDYQSFDESLAKAYKGTLISPYELRFKALNELLSKQDLARVILHIAKRRGYDNIKNSDDKEKGAILKAVKENEEKLANYKSVGEYLYKEYFQKFKENSKEFINVRNKKESYERCIAQSFLKDELKLIFQKQREFGFNFSKKFEEEVLSVAFYKRALKDFSHLVGNCSFFVDEKRAPKNSPLAFEFVALTRIVNLLNNLNKNNSYIKDDLNALLSEVLKNGTLTYKQTKKILGLSDDYEFKGQKGNYFIEFKKYKEFIKALCEHNLNQDDLNEIAKDITLVKDETKLKKALAKYDLNQNQIENLSKIEFKDHLNISFKALKLIVPLMREGKKYDEVCNELNLKTAINEDKKEFLPAFNETYYKDEVNNPVVLRAIKEYRKVLNSLLKKYGKVHKINIELAREVGKNHRERSKIEKEQNENFKAKKDAELECEKLGLKINSKNILKLRLFKEQKEFCVYSGEKIKISDLQDEKMLEIDHIYPYSRSFDDSYMNKVLVFTKQNQEKLNKTPFEAFGKDDVKWQKIETLAKNLPAKKQKRILDKNYKDKEQKDFKDRNLNDTRYIARLVLNYTKDYLEFLPLSDDENIKLNDTQKGSKVHVEAKSGMLTSVLRHTWGFSTKDRNNHLHHAIDAVIIAYANASVVKAFSDFKKEQENYTAELYAKKINELDFKNKRKFFEPFSNFRQKVLEKIDEIFVSKPERKKPSGALHEETFYKEEEFYKEYGGKEGVLKALELGKIRKVNGKIVSNANMFRVDIFKYKKTNKFYAVPIYTMDFALGILPNKAVVGGKDKQGIIKDWLLMDENYEFCFSLYKDSLILLQTKDMQEPELVYFKSFKSSTAGLVVSKHDNKFENLNENQKKLFKSANEKKVVAEGIGIQNLKVFEKYIVSALGEITKAEIKERENFKKK

SEQ ID NO: 341 - protein, 987 aa, Campylobacter jejuni
MARILAFDIGISSIGWAFSENDELKDCGVRIFTKAENPKTGESLALPRCLARSARKRLARRKARLNHLKHLIANEFKLNYEDYQSFDESLAKAYKGSLISPYELRFRALNELLSKQDFARVILHIAKRRGYDDIKNNGDEEKGEILKAIKQNEEKLVSYQSVGEYLYKEYFQKFKENSKEFINVRNKKESYERCIAQSFLKDELKLIFQKQRKFGFSFSKKFEEEVLSVAFYKRALKDFSHLVGNCSFFTDEKRAPKNSPLAFMFVALTRIINLLNNLKNTEGILYTKDDLNTLLNEVLKNGTLTYKQTKKLLGLSNDYEFKGEKGTYFIEFQKYKEFVKALGEHNLSQDDLNEIAKDITLIKDEIKLKKALAKYDLNQNQIDSLSKLEFKDHLNISFKALKLITPLMLEGKKYDEACNELNLKVAINEDKKDFLPAFNETYYKDEVTNPVVLRAIKEYRKVLNALLKKYGKVHKINIELAREVGKNHSQRAKIEKEQNENYKAKKDAELECEKLGLKINSKNILKLRLFKEQKEFCVYSGEKIKISDLQDEKMLEIDHIYPYSRSFDDSYMNKVLVFTKQNQEKLNKTPFETFGNDRVKWQKIEVLAKNLPTKKQKRILDKNYKDKEQKDFKDRNLNDTRYIARLVLNYTKDYLDFLPLSDDENTKLNDTQKGSKVHVEAKSGMLTSTLRHTWGFSTKDRNNHLHHAIDAAIIAYANNSIVKAFSDFKKEQESNTAELYAKKISELDYKNKRKFFEPFSGFRQKLLDKIDEIFVSKPERKKPSGALHEETFRKEEEFYQSYGGKEGVLKALELGKIRKVNGKIVSNGDMFRVDIFKHKKTNKFYAVPIYTMDFALKVLPNKAVVQGKDKKSGLIKDWILMDENYEFCFSLYKDSLILIQTKDMQEPELVYYERLDSSNASLTVSKHDNKFETLSKNQKILFKNANEKEVIAKSIGIQNLKVFEKYIVSALGEVTKAEFRQREDFKK

SEQ ID NO: 342 - protein, 987 aa, Campylobacter jejuni
MARILAFDIGISSIGWAFSENDELKDCGVRIFTKAENPKTGESLALPRRLARSARKRLARRKARLNHLKHLIANEFKLNYEDYQSFDEGLAKAYKGSLISPYELRFRALNELLSKQDFARVILHIAKRRGYDDIKNNGDEEKSEILKAIKQNEEKLVNYQSVGEYLYKEYFQKFKENSKEFINVRNKKESYERCIAQSFLKDELKLIFQKQREFGFSFSKKFEEEVLSVAFYKRALKDFSHLVGNCSFFTDEKRAPKNSPLAFMFVALTRIINLLNNLKNTEGILYTKDDLNTLLNEVLKNGTLTYKQTKKLLGLSDDYEFKGEKGTYFIEFKKYKEFIKALGEHNLSQDNLNEIAKDITLIKDEIKLKKALAKYDLNQNQIDSLSKLEFKDHLNISFKALKLITPLMLEGKKYDEAYNELNLKVAINEDKKDFLPAFNETYYKDEVTNPVVLRAIKEYRKVLNALLKKYGKVHKINIELAREVGKNHSQRAKIEKEQNENYKAKKDAELECEKLGLKINSKNILKLRLFKEQKEFCAYSGEKIKISDLQDEKMLEIDHIYPYSRSFDDSYMNKVLVFTKQNQEKLNQTPFEAFGNDSAKWQKIEVLAKNLPTKKQKRILDKNYKDKEQKDFKDRNLNDTRYIARLVLNYTKDYLDFLPLSDDENTKLNDTQKGSKVHVEAKSGMLTSALRHTWGFSAKDRNNHLHHAIDAVIIAYANNSIVKAFSDFKKEQESNSAELYAKKISELDYKNKRKFFEPFSGFRQKVLDKIDEIFVSKPERKKPSGALHEETFRKEEEFYQSYGGKEGVLKALELGKIRKVNGKIVKNGDMFRVDIFKHKKTNKFYAVPIYTMDFALKVLPNKAVVQGKDKKSGLIKDWILMDENYEFCFSLYKDSLILIQTKDMQEPELVYFNAFTSSTVSLIVSKHDNKFETLSKNQKILFKNANEKEVIAKSIGIQNLKVFEKYIVSALGEVTKAEFRQREDFKK

SEQ ID NO: 343 - protein, 961 aa, Campylobacter jejuni
MARILAFDIGISSIGWAFSENDELKDCGVRIFTKAENPKTGESLALPRRLARSARKRLARRKARLNHLKHLIANEFKLNYEDYQSFDESLAKAYKGSLISPYELRFRALNELLSKQDFARVILHIAKRRGYDDIKNNGDEEKGKILKAIKQNEEKLVNYQSVGEYLYKEYFQKFKENSKEFINVRNKKESYERCITQSFLKYELKLIFQKQREFGFSFSKKFEEEVLSVAFYKRALKDFSHLVGNCSFFSDEKRAPKNSPLAFMFVALTRIINLLNNLKNTEGILYTKDDLNALLNEVLKNGTLTYKQTKKLLGLSDDYEFKGEKGTYFIEFKKYKEFIKALGEHNLSQDDLNEIAKDITLIKDEIKLKKALAKYDLNQNQIDSLSKLEFKDHLNIGFKALKLITPLMLEGKKYDEACNELNLKVAINEDKKDFLPAFNETYYKDEVTNPVVLRAIKEYRKVLNALLKKYGKVHKINIELAREVGKNHSQRAKIEKEQNENYKAKKDAELECEKLGLKINSKNILKLRLFKEQKEFCAYSGEKIKLSDLQDEKMLEIDHIYPYSRSFDDSYMNKVLVFTKQNQEKLNKTPFEAFGNDNVKWQKIEVLAKNLPEKKQKRILDKNYKDKEQKDFKDRNLNDTRYIARLVLNYTKDYLDFLPLSDDENTKLKGSKVHVEAKSGMLTSALRHTWGFSTKDRNNHLHHAIDAAIIAYANNSIVKDFSDFKKEQESNSAELYAKKISELDYKNKRKFFEPFSGFRQKVLDKIDEIFVSKPERKKPSGALHEETFRKEEEFYQSYGGKEGVLKALELGKIRKVNGKIVKNGDMFRVDIFKHKKTNKFYAVPIYTMDFALKVLPNKAVARSKKGEIKDWILMDENYEFCFSLYKDSLILIQTKDMQEPELVYFNAFTSSTVSLIVSKHDNKFETLSKNLKVFEKYIVSALGEVTKAEFRQREDFKNELR

SEQ ID NO: 344 - protein, 984 aa, Campylobacter jejuni
MARILAFDIGISSIGWAFSENDELKDCGVRIFTKAENPKTGESLALPRRLARSARKRLARRKARLNHLKHLIANEFKLNYEDYQSFDESLAKAYKGSLISPYELRFRALNELLSKQDFARVILHIAKRRGYDDIKNNGDEEKGKILKAIKQNEEKLVNYQSVGEYLYKEYFQKFKENSKEFINVRNKKESYERCITQSFLKYELKLIFQKQREFGFSFSKKFEEEVLSVAFYKRALKDFSHLVGNCSFFTDEKRAPKNSPLAFMFVALTRIINILNNLKNTEGILYTKDDLNALLNEVLKNGTLTYKQTKKLLGLSDDYEFKGEKGTYFIEFKKYKEFIKALGEHNLSQDDLNEIAKDITLIKDEIKLKKALAKYDLNQNQIDSLSKLEFKDHLNISFKALKLITPLMLEGKKYDEACNELNLKVAINEDKKDFLPAFNETYYKDEVTNPVVLRAIKEYRKILNALLKKYGKVHKINIELAREVGKNHSQRAKIEKEQNENYKAKKDAEIECEKLGLKINSKNILKLRLFKEQKEFCAYSGEKIKISDLQDEKMLEIDHIYPYSRSFDDSYMNKVLVFTKQNQEKLNQTPFEAFGNDSAKWQKIEVLAKNLPTKKQKRILDKNYKDKEQKDFKDRNLNDTRYIARLVLNYTKDYLDFLPLSDDENTKLNDTQKGSKVHVEAKSGMLTSALRHTWGFSAKDRNNHLHHAIDAVIIAYANNSIVKAFSDFKKEQESNSAELYAKKISELDYKNKRKFFEPFSGFRQKVLDKIDEIFVSKPERKKPSGALHEETFRKEEEFYQSYGGKEGVLKALELGKIRKVNGKIVKNGDMFRVDIFKHKKTNKFYAVPIYTMDFALKVLPNKAVARSKKGEIKDWILMDENYEFCFSLYKDSLILIQTKDMQEPEFVYYNAFTSSTVSLIVSKHDNKFETLSKNQKILFKNANEKEVIAKSIGIQNLKVFEKYIVSALGEVTKAEFRQREDFKK

SEQ ID NO: 345 - protein, 987 aa, Campylobacter jejuni
MARILAFDIGISSIGWAFSENDELKDCGVRIFTKAENPKTGESLALPRRLARSARKRLARRKARLNHLKHLIANEFKLNYEDYQSFDESLAKAYKGSLISPYELRFRALNELLSKQDFARVILHIAKRRGYDDIKNNGDEEKGKILKAIKQNEEKLVSYQSVGEYLYKEYFQKFKENSKEFINVRNKKESYERCIAQSFLKDELKLIFQKQREFGFSFSKKFEEEVLSVAFYKRALKDFSHLVGNCSFLLMKKERQKNSPLAFMFVALTRIINLLNNLKNTEGILYTKDDLNTLLNEALKNGTLTYKQTKKLLGLSNDYEFKGEKGTYFIEFQKYKEFVKALGEHNLSQDDLNEIAKDITLIKDEIKLKKALAKYDLNQNQIDSLSKLEFKDHLNISFKALKLITPLMLEGKKYDEACNELNLKVAINEDKKDFLPAFNETYYKDEVTNPVVLRAIKEYRKVLNALLKKYGKVHKINIELAREVGKNHSQRAKIEKEQNENYKAKKDAELECEKLGLKINSKNILKLRLFKEQKEFCVYSGEKIKISDLQDEKMLEIDHIYPYSRSFDDSYMNKVLVFTKQNQEKLNKTPFETFGNDRVKWQKIEVLAKNLPTKKQKRILDKNYKDKEQKDFKDRNLNDTRYIARLVLNYTKDYLDFLPLSDDENTKLNDTQKGSKVHVEAKSGMLTSTLRHTWGFSTKDRNNHLHHAIDAAIIAYANNSIVKAFSDFKKEQESNTAELYAKKISELDYKNKRKFFEPFSGFRQKLLDKIDEIFVSKPERKKPSGALHEETFRKEEEFYQSYGGKEGVLKALELGKIRKVNGKMVKNGDMFRVDIFKHKKTNKFYAVPIYTMDFALKVLPNKAVVQGKDKKSGLIKDWILMDENYEFCFSLYKDSLILIQTKDMQEPELVYYERLDSSNASLTVSKHDNKFETLSKNQKILFKNANEKEVIAKSIGIQNLKVFEKYIVSALGEVTKAEFRQREDFKK

SEQ ID NO: 346 - protein, 987 aa, Campylobacter jejuni
MARILAFDIGISSIGWAFSENDELKDCGVRIFTKAENPKTGESLALPRRLARSARKRLARRKARLNHLKHLIANEFKLNYEDYQSFDESLAKAYKGSLISPYELRFRALNELLSKQDFARVILHIAKRRGYDDIKNNGDEEKSEILKAIKQNEEKLVNYQSVGEYLYKEYFQKFKENSKEFINVRNKKESYERCIAQSFLKDELKLIFQKQREFGFSFSKKFEEEVLSVAFYKRALKDFSHLVGNCSFFTDEKRAPKNSPLAFMFVALTRIINLLNNLKNTEGILYTKDDLNTLLNEVLKNGTLTYKQTKKLLGLSDDYEFKGEKGTYFIEFKKYKEFIKALGEHNLSQDNLNEIAKDITLIKDEIKLKKALAKYDLNQNQIDSLSKLEFKDHLNISFKALKLITPLMLEGKKYDEAYNELNLKVAINEDKKDFLPAFNETYYKDEVTNPVVLRAIKEYRKVLNALLKKYGKVHKINIELAREVGKNHSQRAKIEKEQNENYKAKKDAELECEKLGLKINSKNILKLRLFKEQKEFCAYSGEKIKISDLQDEKMLEIDHIYPYSRSFDDSYMNKVLVFTKQNQEKLNQTPFEAFGNDSAKWQKIEVLAKNLPTKKQKRILDKNYKDKEQKDFKDRNLNDTRYIARLVLNYTKDYLDFLPLSDDENTKLNDTQKGSKVHVEAKSGMLTSALRHTWGFSAKDRNNHLHHAIDAVIIAYANNSIVKAFSDFKKEQESNSAELYAKKISELDYKNKRKFFEPFSGFRQKVLDKIDEIFVSKPERKKPSGALHEETFRKEEEFYQSYGGKEGVLKALELGKIRKVNGKIVKNGDMFRVDIFKHKKTNKFYPVPIYTMDFALKVLPNKAVVQGKDKKSGLIKDWILMDENYEFCFSLYKDSLILIQTKDMQEPELVYFNAFTSSTVSLIVSKHDNKFETLSKNQKILFKNANEKEVIAKSIGIQNLKVFEKYIVSALGEVTKAEFRQREDFKK

SEQ ID NO: 347 - protein, 987 aa, Campylobacter jejuni
MARILAFDIGISSIGWAFSENDELKDCGVRIFTKAENPKTGESLALPRRLARSARKRLARRKARLNHLKHLIANEFKLNYEDYQSFDESLAKAYKGSLISPYELRFRALNELLSKQDFARVILHIAKRRGYDDIKNNGDEEKSEILKAIKQNEEKLVNYQSVGEYLYKEYFQKFKENSKEFINVRNKKESYERCIAQSFLKDELKLIFQKQREFGFSFSKKFEEEVLSVAFYKRALKDFSHLVGNCSFFTDEKRAPKNSPLAFMFVALTRIINLLNNLKNTEGILYTKDDLNTLLNEVLKNGTLTYKQTKKLLGLSDDYEFKGEKGTYFIEFKKYKEFIKALGEHNLSQDNLNEIAKDITLIKDEIKLKKALAKYDLNQNQIDSLSKLEFKDHLNISFKALKLITPLMLEGKKYDEAYNELNLKVAINEDKKDFLPAFNETYYKDEVTNPVVLRAIKEYRKVLNALLKKYGKVHKINIELAREVGKNHSQRAKIEKEQNENYKAKKDAELECEKLGLKINSKNILKLRLFKEQKEFCAYSGEKIKISDLQDEKMLEIDHIYPYSRSFDDSYMNKVLVFTKQNQEKLNQTPFEAFGNDSAKWQKIEVLAKNLPTKKQKRILDKNYKDKEQKDFKDRNLNDTRYIARLVLNYTKDYLDFLPLSDDENTKLNDTQKGSKVHVEAKSGMLTSALRHTWGFSAKDRNNHLHHAIDAVIIAYANNSIVKAFSDFKKEQESNSAELYAKKISELDYKNKRKFFEPFSGFRQKVLDKIDEIFVSKPERKKPSGALHEETFRKEEEFHQSYGGKEGVLKALELGKIRKVNGKIVKNGDMFRVDIFKHKKTNKFYAVPIYTMDFALKVLPNKAVVQGKDKKSGLIKDWILMDENYEFCFSLYKDSLILIQTKDMQEPELVYFNAFTSSTVSLIVSKHDNKFETLSKNQKILFKNANEKEVIAKSIGIQNLKVFEKYIVSALGEVTKAEFRQREDFKK

SEQ ID NO: 348 - protein, 987 aa, Campylobacter jejuni
MARILAFDIGISSIGWAFSENDELKDCGVRIFTKAENPKTGESLALPRRLARSARKRLARRKARLNHLKHLIANEFKLNYEDYQSFDESLAKAYKGSLISPYELRFRALNELLSKQDFARVILHIAKRRGYDDIKNNGDEEKSEILKAIKQNEEKLVNYQSVGEYLYKEYFQKFKENSKEFINVRNKKESYERCIAQSFLKDELKLIFQKQREFGFSFSKKFEEEVLSVAFYKRALKDFSHLVGNCSFFTDEKRAPKNSPLAFMFVALTRIINLLNNLKNTEGILYTKDDLNTLLNEVLKNGTLTYKQTKKLLGLSDDYEFKGEKGTYFIEFKKYKEFIKALGEHNLSQDNLNEIAKDITLIKDEIKLKKALAKYDLNQNQIDSLSKLEFKDHLNISFKALKLITPLMLEGKKYDEAYNELNLKVAINEDKKDFLPAFNETYYKDEVTNPVVLRAIKEYRKVLNALLKKYGKVHKINIELAREVGKNHSQRAKIEKEQNENYKAKKDAELECEKLGLKINSKNILKLRLFKEQKEFCAYSGEKIKISDLQDEKMLEIDHIYPYSRSFDDSYMNKVLVFTKQNQEKLNQTPFEAFGNDSAKWQKIEVLAKNLPTKKQKRILDKNYKDKEQKDFKDRNLNDTRYIARLVLNYTKDYLDFLPLSDDENTKLNDTQKGSKVHVEAKSGMLTSALRHTWGFSAKDRNNHLHHAIDAVIIAYANNSIVKAFSDFKKEQESNSAELYAKKISELDYKNKRKFFEPFSGFRQKVLDKIDEIFVSKPERKKPSGALHEETFRKEEEFYQSYGGKEGVLKALELGKIRKVNGKIVKNGDMFRVDIFKHKKTNKFYAVPIYTMDFALKVLPNKAVVQGKDKKSGLIKDWILMDENYEFCFSLYKDSLILIQTKDMQEPELVYFNAFTSSTVSLIVSKHDNKFETLSKNQKILFKNANEKEVIAKSIGIQNLKVFEKYIVSALGEVTKAEFRQREDFKK

SEQ ID NO: 349 - protein, 861 aa, Campylobacter jejuni
MARILAFDIGISSIGWAFSENDELKDCGVRIFTKAENPKTGESLALPRRLARSARKRLARRKARLNHLKHLIANEFKLNYEDYQSFDESLAKAYKGSLISPYELRFRALNELLSKQDFARVILHIAKRRGYDDIKNNGDEEKSEILKAIKQNEEKLVNYQSVGEYLYKEYFQKFKENSKEFINVRNKKESYERCITQSFLKDELKLIFQKQREFGFSFSKKFEEEVLSVAFYKRALKDFSHLVGNCSFFTDEKRAPKNSPLAFMFVALTRIINILNNLKNTEGILYTKDDLNALLNEVLKNGTLTYKQTKKLLGLSDDYEFKGEKGTYFIEFKKYKEFIKALGEHNLSQDDLNEIAKDITLIKDEIKLKKALAKYDLNQNQIDSLSKLEFKDHLNISFKALKLITPLMLEGKKYDEACNELNLKVAINEDKKDFLPAFNETYYKDEVTNPVVLRAIKEYRKILNALLKKYGKVHKINIELAREVGKNHSQRAKIEKEQNENYKAKKDAEIECEKLGLKINSKNILKLRLFKEQKEFCAYSGEKIKLSDLQDEKMLEIDHIYPYSRSFDDSYMNKVLVFTKQNQEKLNKTPFEAFGNDSTKWQKIEVLAKNLPEKKQKRILDKNYKDKEQKDFKDRNLNDTRYIARLVLNYTKDYLDFLPLSDDENTKLNDTQKGSKVHVEAKSGMLTSALRHTWGFSAKDRNNHLHHAIDAAIIAYANNSIVKAFSDFKKEQESNSVELYAKKISELDYKNKRKFFEPFSGFRQKVLDKIDEIFVSKPERKKPSGALHEETFRKEEEFYQSYGGKEGVLKALELGKIRKVNGKIVKNGDMFRVDIFKHKKTNKFLCCANLYYGFCFKSITK

SEQ ID NO: 350 - protein, 462 aa, Campylobacter jejuni
MARILAFDIGISSIGWAFSENDELKDCGVRIFTKAENPKTGESLALPRRLARSARKRLARRKARLNHLKHLIANEFKLNYEDYQSFDESLAKAYKGSLISPYELRFRALNELLSKQDFARVILHIAKRRGYDDIKNNGDEEKSEILKAIKQNEEKLVNYQSVGEYLYKEYFQKFKENSKEFINVRNKKESYERCITQSFLKDELKLIFQKQREFGFSFSKKFEEEVLSVAFYKRALKDFSHLVGNCSFFTDEKRAPKNSPLAFMFVALTRIINILNNLKNTEGILYTKDDLNALLNEVLKNGTLTYKQTKKLLGLSDDYEFKGEKGTYFIEFKKYKEFIKALGEHNLSQDDLNEIAKDITLIKDEIKLKKALAKYDLNQNQIDSLSKLEFKDHLNISFKALKLITPLMLEGKKYDEACNELNLKVAINEDKKDFLPAFNETYYKDEVTNPVVLRAIKEYRKS

SEQ ID NO: 351 - protein, 984 aa, Campylobacter jejuni
MARILAFDIGISSIGWAFSENDELKDCGVRIFTKAENPKTGESLALPRRLARSARKRLARRKARLNHLKHLIANEFKLNYEDYQSFDESLAKAYKGSLISPYELRFRALNELLSKQDFARVILHIAKRRGYDDIKNNGDEEKSEILKAIKQNEEKLVNYQSVGEYLYKEYFQKFKENSKEFINVRNKKESYERCITQSFLKDELKLIFQKQREFGFSFSKKFEEEVLSVAFYKRALKDFSHLVGNCSFFTDEKRAPKNSPLAFMFVALTRIINLLNNLKNTEGILYTKDDLNALLNEVLKNGTLTYKQTKKLLGLSDDYEFKGEKGTYFIEFKKYKEFIKALDEHSLSQDDLNEIAKDITLIKDEIKLKKALAKYDLNQNQIDSLSKLEFKDHLNISFKALKLITPLMLEGKKYDEACNELNLKVAINEDKKDFLPAFNETYYKDEVTNPVVLRAIKEYRKILNALLKKYGKVHKINIELAREVGKNHSQRAKIEKEQNENYKAKKDAEIECEKLGLKINSKNILKLRLFKEQKEFCAYSGEKIKISDLQDEKMLEIDHIYPYSRSFDDSYMNKVLVFTKQNQEKLNKTPFEAFGNDGVKWQKIEVLAKNLPEKKQKRILDKNYKDKEQKDFKDRNLNDTRYIARLVLNYTKDYLDFLPLSDDENTKLNDTQKGSKVHVEAKSGMLTSALRHTWGFSTKDRNNHLHHAIDAAIIAYANNSIVKAFSDFKKEQESNSAELYAKKISELDYKNKRKFFEPFSGFRQKVLDKIDEIFVSKPERKKPSGALHEETFRKEEEFYQSYGGKEGVLKALELGKIRKVNGKIVKNGDMFRVDIFKHKKTNKFYAVPIYTMDFALKVLPNKAVARSKKGEIKDWILMDENYEFCFSLYKDSLILIQTKDMQEPELVYFNAFTSSTVSLVVSKHDNKFETLSKNQKILFKNANEKEVIAKSIGIQNLKVFEKYIVSALGEVTKAEFRQREDFKK

SEQ ID NO: 352 - protein, 984 aa, Campylobacter jejuni
MARILAFDIGISSIGWAFSENDELKDCGVRIFTKAENPKTGESLALPRRLARSARKRLARRKARLNHLKHLIANEFKLNYEDYQSFDESLAKAYKGSLISPYELRFRALNELLSKQDFARVILHIAKRRGYDDIKNSDDKEKGAILKAIKQNEEKLANYQSVGEYLYKEYFQKFKENSKEFTNVRNKKESYERCIAQSFLKDELKLIFKKQREFGFSFSKKFEEEVLSVAFYKRALKDFSHLVGNCSFFTDEKRAPKNSPLAFMFVALTRIINLLNNLKNTEGILYTKDDLNALLNEVLKNGTLTYKQTKKLLGLSDDYEFKGEKGTYFIEFKKYKEFIKALGDHSLSQDDLNEIAKDITLIKDEIKLKKALAKYDLNQNQIDSLSKLEFKDHLNISFKALKLITPLMLEGKKYDEACNELNLKVAINEDKKDFLPAFNETYYKDEVTNPVVLRAIKEYRKVLNALLKKYGKVHKINIELAREVGKNYSQRAKIEKEQNENYKAKKDAELECEKLGLKINSKNILKLRLFKEQKEFCAYSGEKIKISDLQDEKMLEIDHIYPYSRSFDDSYMNKVLVFTKQNQEKLNQTPFEAFGNDSAKWQKIEVLAKNLPTKKQKRILDKNYKDKEQKDFKDRNLNDTRYIARLVLNYTKDYLDFLPLSDDENTKLNDTQKGSKVHVEAKSGMLTSALRHTWGFSAKDRNNHLHHAIDAVIIAYANNSIVKAFSDFKKEQESNSAELYAKKISELDYKNKRKFFEPFSGFRQKVLDKIDEIFVSKPERKKPSGALHEETFRKEEEFYQSYGGKEGVLKALELGKIRKVNGKIVKNGDMFRVDIFKHKKTNKFYAVPIYTMDFALKVLPNKAVARSKKGEIKDWILMDENYEFCFSLYKDSLILIQTKDMQEPEFVYYNAFTSSTVSLIVSKHDNKFETLSKNQKILFKNANEKEVIAKSIGIQNLKVFEKYIVSALGEVTKAEFRQREDFKK

SEQ ID NO: 353 - protein, 984 aa, Campylobacter jejuni
MARILAFDIGISSIGWAFSENDELKDCGVRIFTKAENPKTGESLALPRRLARSARKRLARRKARLNHLKHLIANEFKLNYEDYQSFDESLAKAYKGSLISPYELRFRALNELLSKQDFARVILHIAKRRGYDDIKNSDDKEKGAILKAIKQNEEKLANYQSVGEYLYKEYFQKFKENSKEFTNVRNKKESYERCIAQSFLKDELKLIFKKQREFGFSFSKKFEEEVLSVAFYKRALKDFSHLVGNCSFFTDEKRAPKNSPLAFMFVALTRIINLLNNLKNTEGILYTKDDLNTLLNEVLKNGTLTYKQTKKLLGLSDDYEFKGEKGTYFIEFKKYKEFIKALGEHNLSQDDLNEIAKDITLIKDEIKLKKALAKYDLNQNQIDSLSKLEFKDHLNISFKALKLITPLMLEGKKYDEACNELNLKVAINEDKKDFLPAFNETYYKDEVTNPVVLRAIKEYRKVLNALLKKYGKVHKINIELAREVGKNYSQRAKIEKEQNENYKAKKDAELECEKLGLKINSKNILKLRLFKEQKEFCAYSGEKIKISDLQDEKMLEIDHIYPYSRSFDDSYMNKVLVFTKQNQEKLNKTPFEAFGNDSTKWQKIEVLAKNLPEKKQKRILDKNYKDKEQKDFKDRNLNDTRYIARLVLNYTKDYLDFLPLSDDENTKLNDTQKGLKVHVEAKSGMLTSALRHTWGFSAKDRNNHLHHAIDAVIIAYANNSIVKAFSDFKKEQESNSAELYAKKISELDYKNKRKFFEPFSGFRQKVLDKIDEIFVSKPERKKPSGALHEETFRKEEEFYQSYGGKEGVLKALELGKIRKVNGKIVKNGDMFRVDIFKHKKTNKFYAVPIYTMDFALKVLPNKAVARSKKGEIKDWILMDENYEFCFSLYKDSLILIQTKDMQEPEFVYYNAFTSSTVSLIVSKHDNKFETLSKNQKILFKNANEKEVIAKSIGIQNLKVFEKYIVSALGEVTKAEFRQREDFKK

SEQ ID NO: 354 - protein, 984 aa, Campylobacter jejuni
MARILAFDIGISSIGWAFSENDELKDCGVRIFTKAENPKTGESLALPRRLARSARKRLARRKARLNHLKHLIANEFKLNYEDYQSFDESLAKAYKGSLISPYELRFRALNELLSKQDFARVILHIAKRRGYDDIKNSDDKEKGAILKAIKQNEEKLANYQSVGEYLYKEYFQKFKENSKEFTNVRNKKESYERCIAQSFLKDELKLIFKKQREFGFSFSKKFEEEVLSVAFYKRALKDFSHLVGNCSFFTDEKRAPKNSPLAFMFVALTRIINLLNNLKNTEGILYTKDDLNALLNEVLKNGTLTYKQTKKLLGLSDDYEFKGEKGTYFIEFKKYKEFIKALGDHSLSQDDLNEIAKDITLIKDEIKLKKALAKYDLNQNQIDSLSKLEFKDHLNISFKALKLITPLMLEGKKYDEACNELNLKVAINEDKKDFLPAFNETYYKDEVTNPVVLRAIKEYRKVLNALLKKYGKVHKINIELAREVGKNYSQRAKIEKEQNENYKAKKDAELECEKLGLKINSKNILKLRLFKEQKEFCAYSGEKIKISDLQDEKMLEIDHIYPYSRSFDDSYMNKVLVFTKQNQEKLNQTPFEAFGNDSAKWQKIEVLAKNLPTKKQKRILDKNYKDKEQKNFKDRNLNDTRYIARLVLNYTKDYLDFLPLSDDENTKLNDTQKGSKVHVEAKSGMLTSALRHTWGFSAKDRNNHLHHTIDAVIIAYANNSIVKAFSDFKKEQESNSAELYAKKISELDYKNKRKFFEPFSGFRQKVLDKIDEIFVSKPERKKPSGALHEETFRKEEEFYQSYGGKEGVLKALELGKIRKVNGKIVKNGDMFRVDIFKHKKTNKFYAVPIYTMDFALKVLPNKAVARSKKGEIKDWILMDENYEFCFSLYKDSLILIQTKDMQEPEFVYYNAFTSSTVSLIVSKHDNKFETLSKNQKILFKNANEKEVIAKSIGIQNLKVFEKYIVSALGEVTKAEFRQREDFKK

SEQ ID NO: 355 - protein, 984 aa, Campylobacter jejuni
MARILAFDIGISSIGWAFSENDELKDCGVRIFTKAENPKTGESLALPRRLARSARKRLARRKARLNHLKHLIANEFKLNYEDYQSFDESLAKAYKGSLISPYELRFRALNELLSKQDFARVILHIAKRRGYDDIKNSDDKEKGAILKAIKQNEEKLANYQSVGEYLYKEYFQKFKENSKEFTNVRNKKESYERCIAQSFLKDELKLIFKKQREFGFSFSKKFEEEVLSVAFYKRALKDFSHLVGNCSFFTDEKRAPKNSPLAFMFVALTRIINLLNNLKNTEGILYTKDDLNTFLNEVLKNGTLTYKQTKKLLGLSDDYEFKGEKGTYFIEFKKYKEFIKALGDHNLSQDDLNEIAKDITLIKDEIKLKKALAKYDLNQNQIDSLSKLEFKDHLNISFKALKLITPLMLEGKKYDEACNELNLKVAINEDKKDFLPAFNETYYKDEVTNPVVLRAIKEYRKVLNALLKKYGKVHKINIELAREVGKNHSQRAKIEKEQNENYKAKKDAELECEKLGLKINSKNILKLRLFKEQKEFCAYSGEKIKISDLQDEKMLEIDHIYPYSRSFDDSYMNKVLVFTKQNQEKLNKTPFEAFGNDSAKWQKIEVLAKNLPTKKQKRILDKNYKDKEQKDFKDRNLNDTRYIARLVLNYTKDYLDFLPLSDDENTKLNDTQKGSKVHVEAKSGMLTSALRHTWGFSTKDRNNHLHHAIDAVIIAYANNSIVKAFSDFKKEQESNSAELYAKKISELDYKNKRKFFEPFSGFRQKVLDKIDEIFVSKPERKKPSGALHEETFRKEEEFYQSYGGKEGVLKALELGKIRKVNGKIVKNGDMFRVDIFKHKKTNKFYAVPIYTMDFALKVLPNKAVARSKKGEIKDWILMDENYEFCFSLYKDSLILIQTKDMQEPEFVYYNAFTSSTVSLIVSKHDNKFETLSKNQKILFKNANEKEVIAKSIGIQNLKVFEKYIVSALGEVTKAEFRQREDFKK

SEQ ID NO: 356 - protein, 987 aa, Campylobacter jejuni
MARILAFDIGISSIGWAFSENDELKDCGVRIFTKAENPKTGESLALPRRLARSARKRLARRKARLNHLKHLIANEFKLNYEDYQSFDESLAKAYKGSLISPYELRFRALNELLSKQDFARVILHIAKRRGYDDIKNSDDKEKGAILKAIKQNEEKLANYQSVGEYLYKEYFQKFKENSKEFTNVRNKKESYERCIAQSFLKDELKLIFKKQREFGFSFSKKFEEEVLSVAFYKRALKDFSHLVGNCSFFTDEKRAPKNSPLAFMFVALTRIINLLNNLKNTEGILYTKDDLNTLLNEVLKNGTLTYKQTKKLLGLSDDYEFKGEKGTYFIEFKKYKEFIKSLGDHSLSQDDLNEIAKDITLIKDEIKLKKALAKYDLNQNQIDSLSKLEFKDHLNISFKALKLITPLMLEGKKYDEACNELNLKVAINEDKKDFLPAFNETYYKDEVTNPVVLRAIKEYRKVLNALLKKYGKVHKINIELAREVGKNHSQRAKIEKEQNENYKAKKDAELECEKLGLKINSKNILKLRLFKEQKEFCAYSGEKIKISDLQDEKMLEIDHIYPYSRSFDDSYMNKVLVFTKQNQEKLNQTPFEAFGNDSAKWQKIEVLAKNLPTKKQKRILDKNYKDKEQKNFKDRNLNDTRYIARLVLNYTKDYLDFLPLSDDENTKLNDTQKGSKVHVEAKSGMLTSALRHTWGFSAKDRNNHLHHAIDAVIIAYANNSIVKAFSDFKKEQESNSAELYAKKISELDYKNKRKFFEPFSGFRQKVLDKIDEIFVSKPERKKPSGALHEETFRKEEEFYQSYGGKEGVLKALELGKIRKVNGKIVKNGDMFRVDIFKHKKTNKFYAVPIYTMDFALKVLPNKAVARSKKGEIKDWILMDENYEFCFSLYKDSLILIQTKDMQEPEFVYYNAFTSSTVSLIVSKHDNKFETLSKNQKILFKNANEKEVIAKSIGIQNLKVFEKYIVSALGEVTKAEFRQREDFKNELR

SEQ ID NO: 357 - protein, 987 aa, Campylobacter jejuni
MARILAFDIGISSIGWAFSENDELKDCGVRIFTKAENPKTGESLALPRRLARSARKRLARRKARLNHLKHLIANEFKLNYEDYQSFDESLAKAYKGSLISPYELRFRALNELLSKQDFARVILHIAKRRGYDDIKNSDDKEKGAILKAIKQNEEKLANYQSVGEYLYKEYFQKFKENSKEFTNVRNKKESYERCIAQSFLKDELKLIFKKQREFGFSFSKKFEEEVLSVAFYKRALKDFSHLVGNCSFFTDEKRAPKNSPLAFMFVALTRIINLLNNLKNTEGILYTKDDLNALLNEVLKNGTLTYKQTKKLLGLSDDYEFKGEKGTYFIEFKKYKEFIKALGDHSLSQDDLNEIAKDITLIKDEIKLKKALVKYDLNQNQIDSLSKLEFKDHLNISFKALKLITPLMLEGKKYDEACNELNLKVAINEDKKDFLPAFNETYYKDEVTNPVVLRAIKEYRKVLNALLKKYGKVHKINIELAREVGKNYSQRAKIEKEQNENYKAKKDAELECEKLGLKINSKNILKLRLFKEQKEFCAYSGEKIKISDLQDEKMLEIDHIYPYSRSFDDSYMNKVLVFTKQNQEKLNQTPFEAFGNDSAKWQKIEVLAKNLPTKKQKRILDKNYKDKEQKDFKDRNLNDTRYIARLVLNYTKDYLDFLPLSDDENTKLNDTQKGSKVHVEAKSGMLTSALRHTWGFSAKDRNNHLHHAIDAVIIAYANNSIVKAFSDFKKEQESNSAELYAKKISELDYKNKRKFFEPFSGFRQKVLDKIDEIFVSKPERKKPSGALHEETFRKEEEFYQSYGGKEGVLKALELGKIRKVNGKIVKNGDMFRVDIFKHKKTNKFYAVPIYTMDFALKVLPNKAVARSKKGEIKDWILMDENYEFCFSLYKDSLILIQTKDMQEPELVYFNAFTSSTVSLIVSKHDNKFETLSKNQKILFKNANEKEVIAKSIGIQNLKVFEKYIVSALGEVTKAEFRQREDFKNELR

SEQ ID NO: 358 - protein, 983 aa, Campylobacter jejuni; identical to SEQ ID NO: 236

SEQ ID NO: 359 - protein, 987 aa, Campylobacter jejuni
MARILAFDIGISSIGWAFSENDELKDCGVRIFTKAENPKTGESLALPRRLARSARKRLARRKARLNHLKHLIANEFKLNYEDYQSFDESLAKAYKGSLISPYELRFRALNELLSKQDFARVILHIAKRRGYDDIKNSDDKEKGAILKAIKQNEEKLVNYQSVGEYLYKEYFQKFKENSKEFTNVRNKKESYERCIAQSFLKDELKLIFKKQREFGFSFSKKFEEEVLSVAFYKRALKDFSHLVGNCSFFTDEKRAPKNSPLAFMFVALTRIINLLNNLKNTEGILYTKDDLNALLNEVLKNGTLTYKQTKKLLGLSDDYEFKGEKGTYFIEFKKYKEFIKALGDHSLSQDDLNEIAKDITLIKDEIKLKKALAKYDLNQNQIDSLSKLEFKDHLNISFKALKLITPLMLEGKKYDEACNELNLKVAINEDKKDFLPAFNETYYKDEVTNPVVLRAIKEYRKVLNALLKKYGKVHKINIELAREVGKNYSQRAKIEKEQNENYKAKKDAELECEKLGLKINSKNILKLRLFKEQKEFCAYSGEKIKISDLQDEKMLEIDHIYPYSRSFDDSYMNKVLVFTKQNQEKLNQTPFEAFGNDSAKWQKIEVLAKNLPTKKQKRILDKNYKDKEQKDFKDRNLNDTRYIARLVLNYTKDYLDFLPLSDDENTKLNDTQKGSKVHVEAKSGMLTSALRHTWGFSAKDRNNHLHHAIDAVIIAYANNSIVKAFSDFKKEQESNSAELYAKKISELDYKNKRKFFEPFSGFRQKVLDKIDEIFVSKPERKKPSGALHEETFRKEEEFYQSYGGKEGVLKALELGKIRKVNGKIVKNGDMFRVDIFKHKKTNKFYAVPIYTMDFALKVLPNKAVARSEKGEIKDWILMDENYEFCFSLYKDSLILIQTKDMQEPELVYFNAFTSSTVSLIVSKHDNKFETLSKNQKILFKNANEKEVIAKSIGIQNLKVFEKYIVSALGEVTKAEFRQREDFKNELR

SEQ ID NO: 360 - protein, 987 aa, Campylobacter jejuni
MARILAFDIGISSIGWAFSENDELKDCGVRIFTKAENPKTGESLALPRRLARSARKRLARRKARLNHLKHLIANEFKLNYEDYQSFDESLAKAYKGSLISPYELRFRALNELLSKQDFARVILHIAKRRGYDNIKNSDNEEKSEILKAIKQNEEKLVNYQSVGEYLYKEYFQKFKENSKEFINVRNKKESYERCIAQSFLKDELKLIFQKQREFGLSFSKKFEEEVLSVAFYKRALKDFSHLVGNCSFFTDEKRAPKNSPLAFMFVALTRIINLLNNLKNTEGILYTKDDLNTLLNEVLKNGTLTYKQTKKLLGLSDDYEFKGEKGTYFIEFKKYKEFIKALGDHSLSQDDLNEIAKDITLIKDEIKLKKALAKYDLNQNQIDSLSKLEFKDHLNISFKALKLITPLMLEGKKYDEACNELNLKVVINEDKKDFLPAFNETYYKDEVTNPVVLRAIKEYRKVLNALLKKYGKVHKINIELAREVGKNHSQRAKIEKEQNENYKAKKDAELECEKLGLKINNKNILKLRLFKEQKEFCAYSGEKIKLSDLQDEKMLEIDHIYPYSRSFDDSYMNKVLVFTKQNQEKLNKTPFEAFGNDSTKWQKIEVLAKNLPTKKQKRILDKNYKDKEQKDFKDRNLNDTRYIARLVLNYTKDYLDFLPLSDDENTKLNDIQKGSKVHVEAKSGMLTSALRHTWGFSTKDRNNHLHHAIDAVIIAYANNSIVKAFSDFKKEQESNSAELYAKKISELDYKNKRKFFEPFSGFRQKVLDKIDEIFVSKPERKKPSGALHEETFRKEEEFYQSYGGKEGVLKALELGKIRKVNGKIVKNGDMFRVDIFKHKKTNKFYAVPIYTMDFALKVLPNKAVVQGKDKKSGLIKDWILMDENYEFCFSLYKDSLILIQTKDMQEPEFVYYNAFTSSTVSLIVSKHDNKFETLSKNQKILFKNANEKEVIAKSIGIQNLKVFEKYIVSALGEVTKAEFRQREDFKK

SEQ ID NO: 361 - protein, 984 aa, Campylobacter jejuni
MARILAFDIGISSIGWAFSENDELKDCGVRIFTKAENPKTGESLALPRRLARSARKRLARRKARLNHLKHLIANEFKLNYEDYQSFDESLAKAYKGSLISPYELRFRALNELLSKQDFARVILHIVKRRGYDDIKNSDDKEKGAILKAIKQNEEKLANYQSVGEYLYKEYFQKFKENSKEFTNVRNKKESYERCIAQSFLKDELKLIFKKQREFGFSFSKKFEEEVLSVAFYKRALKDFSHLVGNCSFFTDEKRAPKNSPLAFMFVALTRIINLLNNLKNTEGILYTKDDLNTLLNEVLKNGTLTYKQTKKLLGLSDDYEFKGEKGTYFIEFKKYKEFIKALGDHSLSQDDLNEIAKDITLIKDEIKLKKALAKYDLNQNQIDSLSKLEFKDHLNISFKALKLITPLMLEGKKYDEACNELNLKVAINEDKKDFLPAFNETYYKDEVTNPVVLRAIKEYRKVLNALLKKYGKVHKINIELAREVGKNHSQRAKIEKEQNENYKAKKDAEFECEKLGLKINSKNILKLRLFKEQKEFCAYSGEKIKISDLQDEKMLEIDHIYPYSRSFDDSYMNKVLVFTKQNQEKLNKTPFEAFGNDSAKWQKIEVLAKNLPTKKQKRILDKNYKDKEQKDFKDRNLNDTRYIARLVLNYTKDYLDFLPLSDDENTKLNDTQKGSKVHVEAKSGMLTSALRHTWGFSTKDRNNHLHHAIDAVIIAYANNSIVKAFSDFKKEQESNSAELYAKKISELDYKNKRKFFEPFSGFRQKVLDKIDEIFVSKPERKKPSGALHEETFRKEEEFYQSYGGKEGVLKALELGKIRKVNGKIVKNGDMFRVDIFKHKKTNKFYAVPIYTMDFALKVLPNKAVARSKKGEIKDWILMDENYEFCFSLYKDSLILIQTKDMQEPEFVYYNAFTSSTVSLIVSKHDNKFETLSKNQKILFKNANEKEVIAKSIGIQNLKVFEKYIVSALGEVTKAEFRQREDFKK

SEQ ID NO: 362 - protein, 984 aa, Campylobacter jejuni
MARILAFDIGISSIGWAFSENDELKDCGVRIFTKAENPKTGESLALPRRLARSARKRLARRKARLNHLKHLIANEFKLNYEDYQSFDESLAKAYKGSLISPYELRFRALNELLSKQDFARVILHIVKRRGYDDIKNSDDKEKGTILKAIKQNEEKLANYQSVGEYLYKEYFQKFKENSKEFTNVRNKKESYERCIAQSFLKDELKLIFKKQREFGFSFSKKFEEEVLSVAFYKRALKDFSHLVGNCSFFTDEKRAPKNSPLAFMFVALTRIINLLNNLKNTEGILYTKDDLNTLLNEVLKNGTLTYKQTKKLLGLSDDYEFKGEKGTYFIEFKKYKEFIKALGEHNLSQDDLNEIAKDITLIKDEIKLKKALAKYDLNQNQIDSLSKLEFKDHLNISFKALKLITPLMLEGKKYDEACNELNLKVAINEDKKDFLPAFNETYYKDEVTNPVVLRAIKEYRKVLNALLKKYGKVHKINIELAREVGKNYSQRAKIEKEQNENYKAKKDAELECEKLGLKINSKNILKLRLFKEQKEFCAYSGEKIKISDLQDEKMLEIDHIYPYSRSFDDSYMNKVLVFTKQNQEKLNQTPFEAFGNDSAKWQKIEVLAKNLPTKKQKRILDKNYKDKEQKDFKDRNLNDTRYIARLVLNYTKDYLDFLPLSDDENTKLNDTQKGSKVHVEAKSGMLTSALRHTWGFSAKDRNNHLHHAIDAVIIAYANNSIVKAFSDFKKEQESNSAELYAKKISELDYKNKRKFFEPFSGFRQKVLDKIDEIFVSKPERKKPSGALHEETFRKEEEFYQSYGGKEGVLKALELGKIRKVNGKIVKNGDMFRVDIFKHKKTNKFYAVPIYTMDFALKVLPNKAVARSKKGEIKDWILMDENYEFCFSLYKDSLILIQTKDMQEPEFVYYNAFTSSTVSLIVSKHDNKFETLSKNQKILFKNANEKEVIAKSIGIQNLKVFEKYIVSALGEVTKAEFRQREDFKK

SEQ ID NO: 363 - protein, 987 aa, Campylobacter jejuni
MARILAFDIGISSIGWAFSENDELKDCGVRIFTKAENPKTGESLALPRRLARSARKRLARRKARLNHLKHLIANEFKLNYEDYQSFNESLAKAYKGSLISPYELRFRALNELLSKQDFARVILHIAKRRGYDDIKNSDDKEKGAILKVIKQNEEKLANYQSVGEYLYKEYFQKFKENSKEFTNVRNKKESYERCIAQSFLKDELKLIFQKQREFGFSFSKKFEEEVLSVAFYKRALKDFSHLVGNCSFFTDEKRAPKNSPLAFMFVALTRIINLLNNLKNTEGILYTKDDLNALLNEVLKNGTLTYKQTKKLLGLSDDYEFKGEKGTYFIEFKKYKEFIKALGDHSLSQDDLNEIAKDITLIKDEIKLKKALAKYDLNQNQIDSLSKLEFKDHLNISFKALKLITPLMLEGKKYDEACNELNLKVAINEDKKDFLPAFNETYYKDEVTNPVVLRAIKEYRKVLNALLKKYGKVHKINIELAREVGKNYSQRAKIEKEQNENYKAKKDAELECEKLGLKINSKNILKLRLFKEQKEFCAYSGEKIKISDLQDEKMLEIDHIYPYSRSFDDSYMNKVLVFTKQNQEKLNQTPFEAFGNDSAKWQKIEVLAKNLPTKKQKRILDKNYKDKEQKDFKDRNLNDTRYIARLVLNYTKDYLDFLPLSDDENTKLNDTQKGSKVHVEAKSGMLTSALRHTWGFSAKDRNNHLHHAIDAVIIAYANNSIVKAFSDFKKEQESNSAELYAKKISELDYKNKRKFFEPFSGFRQKVLDKIDEIFVSKPERKKPSGALHEETFRKEEEFYQSYGGKEGVLKALELGKIRKVNGKIVKNGDMFRVDIFKHKKTNKFYAVPIYTMDFALKVLPNKAVARSKKGEIKDWILMDENYEFCFSLYKDSLILIQTKDMQEPELVYFNAFTSSTVSLIVSKHDNKFETLSKNQKILFKNANEKEVIAKSIGIQNLKVFEKYIVSALGEVTKAEFRQREDFKNELR

SEQ ID NO: 364 - protein, 984 aa, Campylobacter jejuni
MARILAFDIGISSIGWAFSENDELKDCGVRIFTKAENPKTGESLALPRRLARSARKRLARRKARLNRLKHLIANEFKLNYEDYQSFDESLAKAYKGSLISPYELRFRALNELLSKQDFARVILHIAKRRGYDDIKNSDDKEKGAILKAIKQNEEKLANYQSVGEYLYKEYFQKFKENSKEFTNVRNKKESYERCIAQSFLKDELKLIFKKQREFGFSFSKKFEEEVLSVAFYKRALKDFSHLVGNCSFFTDEKRAPKNSPLAFMFVALTRIINLLNNLKNTEGILYTKDDLNALLNEVLKNGTLTYKQTKKLLGLSDDYEFKGEKGTYFIEFKKYKEFIKALGDHSLNQDDLNEIAKDITLIKDEIKLKKALAKYDLNQNQIDSLSKLEFKDHLNISFKALKLITPLMLEGKKYDEACNELNLKVAINEDKKDFLPAFNETYYKDEVTNPVVLRAIKEYRKVLNALLKKYGKVHKINIELAREVGKNYSQRAKIEKEQNENYKAKKDAELECEKLGLKINSKNILKLRLFKEQKEFCVYSGEKIKISDLQDEKMLEIDHIYPYSRSFDDSYMNKVLVFTKQNQEKLNQTPFEAFGNDSAKWQKIEVLAKNLPTKKQKRILDKNYKDKEQKDFKDRNLNDTRYIARLVLNYTKDYLDFLPLSDDENTKLNDTQKGSKVYVEAKSGMLTSALRHTWGFSTKDRNNHLHHAIDAVIIAYANNSIVKAFSDFKKEQESNSAELYAKKISELDYKNKRKFFEPFSGFRQKVLDKIDEIFVSKPERKKPSGALHEETFRKEEEFYQSYGGKEGVLKALELGKIRKVNGKIVKNGDMFRVDIFKHKKTNKFYAVPIYTMDFALKVLPNKAVARSKKGEIKDWILMDENYEFCFSLYKDSLILIQTKDMQEPEFVYYNAFTSSTVSLIVSKHDNKFETLSKNQKILFKNANEKEVIAKSIGIQNLKVFEKYIVSALGEVTKAEFRQREDFKK

SEQ ID NO: 365 - protein, 984 aa, Campylobacter jejuni
MARILAFDIGISSIGWAFSENDELKDCGVRIFTKVENPKTGESLALPRRLARSARKRLARRKARLNHLKHLIANEFKLNYEDYQSFDESLAKAYKGSLISPYELRFRALNELLSKQDFARVILHIAKRRGYDDIKNSDDKEKGAILKAIKQNEEKLANYQSVGEYLYKEYFQKFKENSKEFTNVRNKKESYERCIAQSFLKDELKLIFKKQREFGFSFLKKFEEEVLSVAFYKRALKDFSHLVGNCSFFTDEKRAPKNSPLAFMFVALTRIINLLNNLKNTEGILYTKDDLNALLNEVLKNGTLTYKQTKKLLGLSDDYEFKGEKGTYFIEFKKYKEFIKALGEHNLSQDDLNEIAKDITLIKDEIKLKKALAKYDLNQNQIDSLSKLEFKDHLNISFKALKLITPLMLEGKKYDEAYNELNLKVAINEDKKDFLPAFNETYYKDEVTNPVVLRAIKEYRKVLNALLKKYGKVHKINIELAREVGKNHSQRAKIEKEQNENYKAKKDAELECEKLGLKINSKNILKLRLFKEQKEFCAYSGEKIKISDLQDEKMLEIDHIYPYSRSFDDSYMNKVLVFTKQNQEKLNQTPFEAFGNDSAKWQKIEVLAKNLPTKKQKRILDKNYKDKEQKDFKDRNLNDTRYIARLVLNYTKDYLDFLPLSDDENTKLNDTQKGSKVHVEAKSGMLTSALRHTWGFSAKDRNNHLHHAIDAVIIAYANNSIVKAFSDFKKEQESNSAELYAKKISELDYKNKRKFFEPFSGFRQKVLDKIDEIFVSKPERKKPSGALHEETFRKEEEFYQSYGGKEGVLKALELGKIRKVNGKIVKNGDMFRVDIFKHKKTNKFYAVPIYTMDFALKVLPNKAVARSKKGEIKDWILMDENYEFCFSLYKDSLILIQTKDMQEPELVYFNAFTSSTVSLIVSKHDNKFETLSKNQKILFKNANEKEVIAKSIGIQNLKVFEKYIVSALGEVTKAEFRQREDFKK

SEQ ID NO: 366 - protein, 984 aa, Campylobacter jejuni
MARILAFDIGISSIGWAFSENDELKDCGVRIFTKVENPKTGESLALPRRLARSARKRLARRKARLNHLKHLIANEFKLNYEDYQSFDESLAKAYKGSLISPYELRFRALNELLSKQDFARVILHIAKRRGYDDIKNSDDKEKGAILKAIKQNEEKLANYQSVGEYLYKEYFQKFKENSKEFTNVRNKKESYERCIAQSFLKDELKLIFKKQREFGFSFSKKFEEEVLSVAFYKRALKDFSHLVGNCSFFTDEKRAPKNSPLAFMFVALTRIINLLNNLKNTEGILYTKDDLNALLNEVLKNGTLTYKQTKKLLGLSDDYEFKGEKGTYFIEFKKYKEFIKALGEHNLSQDDLNEIAKDITLIKDEIKLKKALAKYDLNQNQIDSLSKLEFKDHLNISFKALKLITPLMLEGKKYDEACNELNLKVAINEDKKDFLPAFNETYYKDEVTNPVVLRAIKEYRKVLNALLKKYGKVHKINIELAREVGKNHSQRAKIEKEQNENYKAKKDAELECEKLGLKINSKNILKLRLFKEQKEFCAYSGEKIKISDLQDEKMLEIDHIYPYSRSFDDSYMNKVLVFTKQNQEKLNKTPFEAFGNDSAKWQKIEVLAKNLPTKKQKRILDKNYKDKEQKDFKDRNLNDTRYIARLVLNYTKDYLDFLPLSNDENTKLNDTQKGSKVHVEAKSGMLTSALRHTWGFSTKDRNNHLHHAIDAVIIAYANNSIVKAFSDFKKEQESNSAELYAKKISELDYKNKRKFFEPFSGFRQKVLDKIDEIFVSKPERKKPSGALHEETFRKEEEFYQSYGGKEGVLKALELGKIRKVNGKIVKNGDMFRVDIFKHKKTNKFYAVPIYTMDFALKVLPNKAVARSKKGEIKDWILMDENYEFCFSLYKDSLILIQTKDMQEPEFVYYNAFTSSTVSLIVSKHDNKFETLSKNQKILFKNANEKEVIAKSIGIQNLKVFEKYIVSALGEVTKAEFRQREDFKK

SEQ ID NO: 367 - protein, 984 aa, Campylobacter jejuni
MARILAFDIGISSIGWAFSENDELKDCGVRIFTKVENPKTGESLALPRRLARSARKRLARRKARLNHLKHLIANEFKLNYEDYQSFDESLAKAYKGSLISPYELRFRALNELLSKQDFARVILHIAKRRGYDDIKNSDDKEKGAILKAIKQNEEKLANYQSVGEYLYKEYFQKFKENSKEFTNVRNKKESYERCIAQSFLKDELKLIFKKQREFGFSFSKKFEEEVLSVAFYKRALKDFSHLVGNCSFFTDEKRAPKNSPLAFMFVALTRIINLLNNLKNTEGILYTKDDLNALLNEVLKNGTLTYKQTKKLLGLSDDYEFKGEKGTYFIEFKKYKEFIKALGEHNLSQDDLNEIAKDITLIKDEIKLKKALAKYDLNQNQIDSLSKLEFKDHLNISFKALKLITPLMLEGKKYDEACNELNLKVAINEDKKDFLPAFNETYYKDEVTNPVVLRAIKEYRKVLNALLKKYGKVHKINIELAREVGKNHSQRAKIEKEQNENYKAKKDAELECEKLGLKINSKNILKLRLFKEQKEFCAYSGEKIKISDLQDEKMLEIDHIYPYSRSFDDSYMNKVLVFTKQNQEKLNKTPFEAFGNDSAKWQKIEVLAKNLPTKKQKRILDKNYKDKEQKDFKDRNLNDTRYIARLVLNYTKDYLDFLPLSDDENTKLNDTQKGSKVHVEAKSGMLTSALRHTWGFSTKDRNNHLHHAIDAVIIAYANNSIVKAFSDFKKEQESNSAELYAKKISELDYKNKRKFFEPFSGFRQKVLDKIDEIFVSKPERKKPSGALHEETFRKEEEFYQSYGGKEGVLKALELGKIRKVNGKIVKNGDMFRVDIFKHKKTNKFYAVPIYTMDFALKVLPNKAVARSKKGEIKDWILMDENYEFCFSLYKDSLILIQTKDMQEPEFVYYNAFTSSTVSLIVSKHDNKFETLSKNQKILFKNANEKEVIAKSIGIQNLKVFEKYIVSALGEVTKAEFRQREDFKK

SEQ ID NO: 368 - protein, 984 aa, Campylobacter jejuni
MARILAFDIGISSIGWAFSENDELKDCGVRIFTKVENPKTGESLALPRRLARSARKRLARRKARLNHLKHLIANEFKLNYEDYQSFDESLAKAYKGSLISPYELRFRALNELLSKQDFARVILHIAKRRGYDDIKNSDDKEKGAILKAIKQNEEKLANYQSVGEYLYKEYFQKFKENSKEFTNVRNKKESYERCIAQSFLKDELKLIFKKQREFGFSFSKKFEEEVLSVAFYKRALKDFSHLVGNCSFFTDEKRAPKNSPLAFMFVTLTRIINLLNNLKNTEGILYTKDDLNALLNEVLKNGTLTYKQTKKLLGLSDDYEFKGEKGTYFIEFKKYKEFIKALGEHNLSQDDLNEIAKDITLIKDEIKLKKALAKYDLNQNQIDSLSKLEFKDHLNISFKALKLITPLMLEGKKYDEACNELNLKVAINEDKKDFLPAFNETYYKDEVTNPVVLRAIKEYRKVLNALLKKYGKVHKINIELAREVGKNHSQRAKIEKEQNENYKAKKDAELECEKLGLKINSKNILKLRLFKEQKEFCAYSGEKIKISDLQDEKMLEIDHIYPYSRSFDDSYMNKVLVFTKQNQEKLNKTPFEAFGNDSAKWQKIEVLAKNLPTKKQKRILDKNYKDKEQKDFKDRNLNDTRYIARLVLNYTKDYLDFLPLSDDENTKLNDTQKGSKVHVEAKSGMLTSALRHTWGFSTKDRNNHLHHAIDAVIIAYANNSIVKAFSDFKKEQESNSAELYAKKISELDYKNKRKFFEPFSGFRQKVLDKIDEIFVSKPERKKPSGALHEETFRKEEEFYQSYGGKEGVLKALELGKIRKVNGKIVKNGDMFRVDIFKHKKTNKFYAVPIYTMDFALKVLPNKAVARSKKGEIKDWILMDENYEFCFSLYKDSLILIQTKDMQEPEFVYYNAFTSSTVSLIVSKHDNKFETLSKNQKILFKNANEKEVIAKSIGIQNLKVFEKYIVSALGEVTKAEFRQREDFKK

SEQ ID NO: 369 - protein, 984 aa, Campylobacter jejuni
MARILAFDIGISSIGWAFSENDELKDCGVRIFTKVENPKTGESLALPRRLARSARKRLARRKARLNHLKHLIANEFKLNYEDYQSFDESLAKAYKGSLISPYELRFRALNELLSKQDFARVILHIAKRRGYDDIKNSDDKEKGAILKAIKQNEEKLANYQSVGEYLYKEYFQKFKENSKEFTNVRNKKESYERCIAQSFLKDELKLIFKKQREFGFSFSKKFEEEVLSVAFYKRALKDFSHLVGNCSFFTDEKRAPKNSPLAFMFVALTRIINLLNNLKNTEGILYTKDDLNALLNEVLKNGTLTYKQTKKLLGLSDDYEFKGEKGTYFIEFKKYKEFIKALGEHNLSQDDLNEIAKDITLIKDEIKLKKALAKYDLNQNQIDSLSKLEFKDHLNISFKALKLITPLMLEGKKYDEACNELNLKVAINEDKKDFLPAFNETYYKDEVTNPVVLRAIKEYRKVLNALLKKYGKVHKINIELAREVGKNHSQRAKIEKEQNENYKAKKDAELECEKLGLKINSKNILKLRLFKEQKEFCAYSGEKIKISDLQDEKMLEIDHIYPYSRSFDDSYMNKVLVFTKQNQEKLNKTPFEAFGNDSAKWQKIEVLAKNLPTKKQKRILDKNYKDKEQKDFKDRNLNDTRYIARLVLNYTKDYLDFLPLSDDENTKLNDTQKGSKVHVEAKSGMLTSALRHTWGFSTKDRNNHLHHAIDAVIIAYANNSIVKAFSDFKKEQESNSAELYAKKISELDYKNKRKFFEPFSGFRQKVLDKIDEIFVSKPERKKPSGALHEETFRKEEEFYQSYGGKEGVLKALELGKIRKVNGKIVKNGDMFRVDIFKHKKTNKFYAVPIYTMDFALKVLPNKAVARSKKGEIKDWILMDENYEFCFSLYKDSLILIQTKDMQEPEFVYYNAFTSSTVSLIVSKHDNKFETLSKNQKILFKNANEKEVIAKSIGIQNLKVFEKYIVSALGEVTKAEFIQREDFKK

SEQ ID NO: 370 - protein, 987 aa, Campylobacter jejuni
MARILAFDIGISSIGWAFSENDELKDCGVRIFTKVENPKTGESLALPRRLARSARKRLARRKARLNHLKHLIANEFKLNYEDYQSFDESLAKAYKGSLISPYELRFRALNELLSKQDFARVILHIAKRRGYDDIKNSDDKEKGAILKAIKQNEEKLANYQSVGEYLYKEYFQKFKENSKEFTNVRNKKESYERCIAQSFLKDELKLIFKKQREFGFSFSKKFEEEVLSVAFYKRALKDFSHLVGNCSFFTDEKRVPKNSPLAFMFVALTRIINLLNNLKNTEGILYTKDDLNALLNEVLKNGTLTYKQTKKLLGLSDDYEFKGEKGTYFIEFKKYKEFIKALGEHNLSQDDLNEIAKDITLIKDEIKLKKALAKYDLNQNQIDSLSKLEFKDHLNISFKALKLITPLMLEGKKYDEACNELNLKVAINEDKKDFLPAFNETYYKDEVTNPVVLRAIKEYRKVLNALLKKYGKVHKINIELAREVGKNHSQRAKIEKEQNENYKAKKDAELECEKLGLKINSKNILKLRLFKEQKEFCAYSGEKIKISDLQDEKMLEIDHIYPYSRSFDDSYMNKVLVFTKQNQEKLNQTPFEAFGNDSAKWQKIEVLAKNLPTKKQKRILDKNYKDKEQKNFKDRNLNDTRYIARLVLNYTKDYLDFLPLSDDENTKLNDTQKGSKVHVEAKSGMLTSALRHTWGFSAKDRNNHLHHAIDAVIIAYANNSIVKAFSDFKKEQESNSAELYAKKISELDYKNKRKFFEPFSGFRQKVLDKIDEIFVSKPERKKPSGALHEETFRKEEEFYQSYGGKEGVLKALELGKIRKVNGKIVKNGDMFRVDIFKHKKTNKFYGVPIYTMDFALKVLPNKAVARSKKGEIKDWILMDENYEFCFSLYKDSLILIQTKDMQEPEFVYYNAFTSSTVSLIVSKHDNKFETLSKNQKILFKNANEKEVIAKSIGIQNLKVFEKYIVSALGEVTKAEFRQREDFKNELR

SEQ ID NO: 371 - protein, 984 aa, Campylobacter jejuni
MARILAFDIGISSIGWAFSENDELKDCGVRIFTKVENPKTGESLALPRRLARSARKRLARRKVRLNHLKHLIANEFKLNYEDYQSFDESLAKAYKGSLISPYELRFRALNELLSKQDFARVILHIAKRRGYDDIKNSDDKEKGAILKAIKQNEEKLANYQSVGEYLYKEYFQKFKENSKEFTNVRNKKESYERCIAQSFLKDELKLIFKKQREFGFSFSKKFEEEVLSVAFYKRALKDFSHLVGNCSFFTDEKRAPKNSPLAFMFVALTRIINLLNNLKNTEGILYTKDDLNALLNEVLKNGTLTYKQTKKLLGLSDDYEFKGEKGTYFIEFKKYKEFIKALGEHNLSQDDLNEIAKDITLIKDEIKLKKALAKYDLNQNQIDSLSKLEFKDHLNISFKALKLITPLMLEGKKYDEACNELNLKVAINEDKKDFLPAFNETYYKDEVTNPVVLRAIKEYRKVLNALLKKYGKVHKINIELAREVGKNHSQRAKIEKEQNENYKAKKDAELECEKLGLKINSKNILKLRLFKEQKEFCAYSGEKIKISDLQDEKMLEIDHIYPYSRSFDDSYMNKVLVFTKQNQEKLNKTPFEAFGNDSAKWQKIEVLAKNLPTKKQKRILDKNYKDKEQKDFKDRNLNDTRYIARLVLNYTKDYLDFLPLSDDENTKLNDTQKGSKVHVEAKSGMLTSALRHTWGFSTKDRNNHLHHAIDAVIIAYANNSIVKAFSDFKKEQESNSAELYAKKISELDYKNKRKFFEPFSGFRQKVLDKIDEIFVSKPERKKPSGALHEETFRKEEEFYQSYGGKEGVLKALELGKIRKVNGKIVKNGDMFRVDIFKHKKTNKFYAVPIYTMDFALKVLPNKAVARSKKGEIKDWILMDENYEFCFSLYKDSLILIQTKDMQEPEFVYYNAFTSSTVSLIVSKHDNKFETLSKNQKILFKNANEKEVIAKSIGIQNLKVFEKYIVSALGEVTKAEFRQREDFKK

SEQ ID NO: 372 - protein, 721 aa, Campylobacter jejuni
MFVALTRIINLLNNLKNTEGILYTKDDLNTLLNEVLKNGTLTYKQTKKLLGLSDDYEFKGEKGTYFIEFKKYKEFIKALGDHSLSQDDLNEIAKDITLIKDEIKLKKALAKYDLNQNQIDSLSKLEFKDHLNISFKALKLITPLMLEGKKYDEACNELNLKVAINEDKKDFLPAFNETYYKDEVTNPVVLRAIKEYRKVLNALLKKYGKVHKINIELAREVGKNYSQRAKIEKEQNENYKAKKDAELECEKLGLKINSKNILKLRLFKEQKEFCAYSGEKIKISDLQDEKMLEIDHIYPYSRSFDDSYMNKVLVFTKQNQEKLNQTPFEAFGNDSAKWQKIEVLAKNLPTKKQKRILDKNYKDKEQKDFKDRNLNDTRYIARLVLNYTKDYLDFLPLSDDENTKLNNTQKGSKVYVEAKSGMLTSALRHTWGFSTKDRNNHLHHAIDAVIIAYANNSIVKAFSDFKKEQESNSAELYAKKISELDYKNKRKFFEPFSGFRQKVLDKIDEIFVSKPERKKPSGALHEETFRKEEEFYQSYGGKEGVLKALELGKIRKVNGKIVKNGDMFRVDIFKHKKTNKFYAVPIYTMDFALKVLPNKAVARSKKGEIKDWILMDENYEFCFSLYKDSLILIQTKDMQEPEFVYYNAFTSSTVSLIVSKHDNKFETLSKNQKILFKNANEKEVIAKSIGIQNLKVFEKYIVSALGEVTKAEFRQREDFKK

SEQ ID NO: 373 - protein, 512 aa, Campylobacter jejuni
MHKINIELAREVGKNHSQRAKIEKEQNENYKAKKDAEIECEKLGLKINSKNILKLRLFKEQKEFCAYSGEKIKLSDLQDEKMLEIDHIYPYSRSFDDSYMNKVLVFTKQNQEKLNKTPFEAFGNDSTKWQKIEVLAKNLPEKKQKRILDKNYKDKEQKDFKDRNLNDTRYIARLVLNYTKDYLDFLPLSDDENTKLNDTQKGSKVHVEAKSGMLTSALRHTWGFSAKDRNNHLHHAIDAAIIAYANNSIVKAFSDFKKEQESNSVELYAKKISELDYKNKRKFFEPFSGFRQKVLDKIDEIFVSKPERKKPSGALHEETFRKEEEFYQSYGGKEGVLKALELGKIRKVNGKIVKNGDMFRVDIFKHKKTNKFYAVPIYTMDFALKVLPNKAVARSKKGEIKDWILMDENYEFCFSLYKDSLILIQTKDMQEPELVYFNAFTSSTVSLIVSKHDNKFETLSKNQKILFKNANEKEVIAKSIGIQNLKVFEKYIVSALGEVTKAEFRQREDFKK

SEQ ID NO: 374 - protein, 965 aa, Campylobacter jejuni
MKIIGFNLGIANIGWALRENDEIIDCGVRVFDIPENPKNGNSLALERRENKARMKIVKRKKARMLATKTFLKKELNVDLSKLFLIGSTQSIYELRAKALSSLISKEELSAIILHIAKHRGYDDSALKNENGTIIEALNKNKETMLKFKSVGEYFYKNFVQNKEVKKIRNTTEDYSNSVPRSLLKQELDLILDKQKELGLIKNADFKEKLFEIIFFKRPLKDFSNKIGNCIFFENEKRAAKNTISACEFVALGKVVNLLKSIEKDIGIVYEKDSINEIMSIILDKTSISYKKIRDILNLPQEINFKGLDYSKNNVENSKLVDLKKLNEFKKALGDGFANLDKDILDSIATDITLTKDTATLKEKLKNYNVLNAEQIEKLSELVFNDHINLSLKALKQIIPLMYEGKRYDEACELCNFTIAKNQEKSEYLPLFEKTRFAKDISSPVVIRAICEFRKLLNDIIRRYGSVHKIHLELTRDFGISFSDRKKIIKEIEQNEQSRIKALETIKELKLEETSKNIQIVRLFEDQKGICPYSGLKMDLNRLDELVIDYIRPYNRSLDDSYSNKVLTFKKLSDLKQGKTPFEAFGEDEKLWAEINERIKEYNGKKRFKIFDKFFKDKKPFDFTEQTLQDTRWLTKLVASYLNEYLSFLPISEDENTALGYGEKGSKQHVILSSGMITQMLRNFWYLGFKNHKDYKNNAMDAIIVAFTTNSIIFAFNNFKKELDLAKAEFYANKISESDYLLKRKFLPPFSGFKEQALEKVKNIFVSHSLKIKNKGTLHDLTPLKIKELKNTYGDLDLAVKLGKIRKYNDKYYANANGSLVRADLFVDKKNKFHAVSIYKADFSTKKLPNKTPATTSNGETKEGIEMNENYNFCMSLYKNTPISVKIKGMKEPIICYYHGFNTSGSKITYKKHDNNYHNLSEDEMVVFRKNDKESIAVGKILEIKKYSISPSGELSLIENEERKWF

SEQ ID NO: 375 - protein, 759 aa, Campylobacter jejuni
MLSVAFYKRALKDFSHLVGNCSFFTDEKRAPKNSPLAFMFVALTRIINLLNNLKNTEGILYTKDDLNALLNEVLKNGTLTYKQTKKLLGLSDDYEFKGEKGTYFIEFKKYKEFIKALGEHNLSQDDLNEIAKDITLIKDEIKLKKALAKYDLNQNQIDSLSKLEFKDHLNISFKALKLITPLMLEGKKYDEACNELNLKVAINEDKKDFLPAFNETYYKDEVTNPVVLRAIKEYRKVLNALLKKYGKVHKINIELAREVGKNHSQRAKIEKEQNENYKAKKDAELECEKLGLKINSKNILKLRLFKEQKEFCAYSGEKIKISDLQDEKMLEIDHIYPYSRSFDDSYMNKVLVFTKQNQEKLNKTPFEAFGNDSAKWQKIEVLAKNLPTKKQKRILDKNYKDKEQKDFKDRNLNDTRYIARLVLNYTKDYLDFLPLSDDENTKLNDTQKGSKVHVEAKSGMLTSALRHTWGFSTKDRNNHLHHAIDAVIIAYANNSIVKAFSDFKKEQESNSAELYAKKISELDYKNKRKFFESFSGFRQKVLDKIDEIFVSKPERKKPSGALHEETFRKEEEFYQSYGGKEGVLKALELGKIRKVNGKIVKNGDMFRVDIFKHKKTNKFYAVPIYTMDFALKVLPNKAVARSKKGEIKDWILMDENYEFCFSLYKDSLILIQTKDMQEPEFVYYNAFTSSTVSLIVSKHDNKFETLSKNQKILFKNANEKEVIAKSIGIQNLKVFEKYIVSALGEVTKAEFRQREDFKK

SEQ ID NO: 376 - protein, 984 aa, Campylobacter jejuni
MVRILAFDIGISSIGWAFSENDELKDCGVRIFTKVENPKTGESLALPRRLARSARKRLARRKARLNHLKHLIANEFKLNYEDYQSFDESLAKAYKGSLISPYELRFRALNELLSKQDFARVILHIAKRRGYDDIKNSDDKEKGAILKAIKQNEEKLANYQSVGEYLYKEYFQKFKENSKEFTNVRNKKESYERCIAQSFLKDELKLIFKKQREFGFSFSKKFEEEVLSVAFYKRALKDFSHLVGNCSFFTDEKRAPKNSPLAFMFVALTRIINLLNNLKNTEGILYTKDDLNALLNEVLKNGTLTYKQTKKLLGLSDDYEFKGEKGTYFIEFKKYKEFIKALGEHNLSQDDLNEIAKDITLIKDEIKLKKALAKYDLNQNQIDSLSKLEFKDHLNISFKALKLITPLMLEGKKYDEACNELNLKVAINEDKKDFLPAFNETYYKDEVTNPVVLRAIKEYRKVLNALLKKYGKVHKINIELAREVGKNHSQRAKIEKEQNENYKAKKDAELECEKLGLKINSKNILKLRLFKEQKEFCAYSGEKIKISDLQDEKMLEIDHIYPYSRSFDDSYMNKVLVFTKQNQEKLNKTPFEAFGNDSAKWQKIEVLAKNLPTKKQKRILDKNYKDKEQKDFKDRNLNDTRYIARLVLNYTKDYLDFLPLSDDENTKLNDTQKGSKVHVEAKSGMLTSALRHTWGFSTKDRNNHLHHAIDAVIIAYANNSIVKAFSDFKKEQESNSAELYAKKISELDYKNKRKFFEPFSGFRQKVLDKIDEIFVSKPERKKPSGALHEETFRKEEEFYQSYGGKEGVLKALELGKIRKVNGKIVKNGDMFRVDIFKHKKTNKFYAVPIYTMDFALKVLPNKAVARSKKGEIKDWILMDENYEFCFSLYKDSLILIQTKDMQEPEFVYYNAFTSSTVSLIVSKHDNKFETLSKNQKILFKNANEKEVIAKSIGIQNLKVFEKYIVSALGEVTKAEFRQREDFKK

SEQ ID NO: 377 - protein, 1003 aa, Campylobacter lari
MRILGFDIGINSIGWAFVENDELKDCGVRIFTKAENPKNKESLALPRRNARSSRRRLKRRKARLIAIKRILAKELKLNYKDYVAADGELPKAYEGSLASVYELRYKALTQNLETKDLARVILHIAKHRGYMNKNEKKSNDAKKGKILSALKNNALKLENYQSVGEYFYKEFFQKYKKNTKNFIKIRNTKDNYNNCVLSSDLEKELKLILEKQKEFGYNYSEDFINEILKVAFFQRPLKDFSHLVGACTFFEEEKRACKNSYSAWEFVALTKIINEIKSLEKISGEIVPTQTINEVLNLILDKGSITYKKFRSCINLHESISFKSLKYDKENAENAKLIDFRKLVEFKKALGVHSLSRQELDQISTHITLIKDNVKLKTVLEKYNLSNEQINNLLEIEFNDYINLSFKALGMILPLMREGKRYDEACEIANLKPKTVDEKKDFLPAFCDSIFAHELSNPVVNRAISEYRKVLNALLKKYGKVHKIHLELARDVGLSKKAREKIEKEQKENQAVNAWALKECENIGLKASAKNILKLKLWKEQKEICIYSGNKISIEHLKDEKALEVDHIYPYSRSFDDSFINKVLVFTKENQEKLNKTPFEAFGKNIEKWSKIQTLAQNLPYKKKNKILDENFKDKQQEDFISRNLNDTRYIATLIAKYTKEYLNFLLLSENENANLKSGEKGSKIHVQTISGMLTSVLRHTWGFDKKDRNNHLHHALDAIIVAYSTNSIIKAFSDFRKNQELLKARFYAKELTSDNYKHQVKFFEPFKSFREKILSKIDEIFVSKPPRKRARRALHKDTFHSENKIIDKCSYNSKEGLQIALSCGRVRKIGTKYVENDTIVRVDIFKKQNKFYAIPIYAMDFALGILPNKIVITGKDKNNNPKQWQTIDESYEFCFSLYKNDLILLQKKNMQEPEFAYYNDFSISTSSICVEKHDNKFENLTSNQKLLFSNAKEGSVKVESLGIQNLKVFEKYIITPLGDKIKADFQPRENISLKTSKKYGLR

SEQ ID NO: 378 - protein, 372 aa, unidentified
  source 1..372: note = Candidatus taxa
DNESAINQIAYILTTQKADEGIRAELDSLPLSDKAKKAIVKIKPTNFKAFGHLSIKALQKITPHILEGMTYDKACEAAGYDFKKQSASLEQITNPVVKRAITQTLKVVRAIERKYGKPYFIKVETARDLAKNFKDRNAIKKENEENQGYNEDIKSIITNGYEASPKTKGGKQLLNHLKEFNVRLNKNADFNGQQIIKVKLYREQQGKCLYSGNPIDFETMLRDDNAYQVDHIVPFSRSNNDGITNKVLVFTEENQKKADRTPFEYFGTDERRWEKFVALVETTYKTRDVKTSDKATNAINYEYNGYAMKKKQNLLLQDYKNDSWNVRALNDTRYITRFIQNYLRQNVDFAEGEEKQRIIAPNGTTTAYLRKR

SEQ ID NO: 379 - protein, 1117 aa, Capnocytophaga ochracea
MKHILGLDLGSNSIGWAFVQQDFENKQGKIIATGSRIIPMDQGILGDFERGNTVSQTAERTTYRSMRRLRERHLLRRERLHRVLHLLGFLPPHYDAQIDFTKRYGKFIDNAEPKIAYNNGNFIFMNSFNEMVEDFKKHQPQLFYKKSNGEESRIPYDWTIYYLRKKALSQKITQQELAWLILHFNQKRGYYQLRGEEETENPNKEVAFHSLKVVDVEAEAPNKKGEIWYTIRLENGWIYRRTSKNPLDDWKGKTRDFIVTTDLNDDGTIKLDKEGKEKRSFRAPDENDWNLLKKKTEHDIDFSGKPVGTYIYDHLLQNPNQKIKGKLVRTIERKYYKDELKAILAKQIALQPELFTETLLADCIRELYRKNETQQQNLLSKDFLHLFVEDIIFYQRPLCSKKSTIANCTLEKRSYIDKETNERKDAPIKVCAKSNPYYQEFRVLQWLQNLRIYEIETDREVTAEFIETPQDYEALFNFLMSQKEIDNEGLLKYFLFAKNPQIKDKAAKSELKKWLTTYRWNYVYDAADNSSKKYPMNETGYELQRYLQKVEGLPANFLTFDITYQLWHLLYSVKDKVEFEKALKKFAKKKQLDKTSFVDSFKNFKPYPNEYGSFSEKAIKKLLPLMRFGNHWDFNRIDVSTQKRIDDLINGVANEDIRTIIREKAEKYQLNSETCFQDLPLWLAQYVVYNRHAEATDIEKWTSVSDLEAYLEDFKQHSLRNPIVEQVVTETLRVVRDIWQQYSGGQANFFDEIHIELGRELKKTAEERKQLSDKNQENENTNLRIKKLLAELKEDASIQNVRPYSLVQQELLKIYEEGVFSSTDEIEEDIQKIRKKVEPTPPEIQRYKLWLEQKYKSPYTGEVISLTKLFTEEYEIEHIIPQSRYYDDSLSNKVICESAVNKLKTNQLGLEFIQNHHGEKVRITANKEVTIFTEEQYKEFVKKHYANNSAKQQKLLLNEIPEKMVARQLNDTRYISKCISEILSKIVRSDEKDEGVNSKNIIPCTGKITTALKQDWGLNDVWNELILPRFERMNQLTQTQLFTSYNDRLQKNLPTVPIEYSQGFQKKRIDHRHHAMDALVIACATREHINYMNNQHALDKSKDKKEKQQSRIDLHPL

SEQ ID NO: 380 - protein, 303 aa, Capnocytophaga ochracea
MSFKQNLRVINKATNYYEKWEEKNGVLVKKKVKQEGTNWAIRKPLHKETVSGKIVLDRKIGKDKILTATRKAVDITFTEKIISSITDTGIQKILLNYLKYKGSPEVAFSAEGLEELNKNIAQYNDGKKHQPIYKVRIFEEGSKFPLGETGAKATKYVEAAKGTNLFFGVYQGKEKRTYATIPLNEVIERQKQGLPSVPERNEKGEPLLFSLSPNDLVYVPMEGEIAETIDFNNLSKEQKERIYKTVSFTGNQCFFVQEAVASPIVNKMEYSPLNKMERDILGIMIKEVCVKLKVDRLGNIIKA

SEQ ID NO: 381 - protein, 1471 aa, Capnocytophaga sp.
MCKYFYIKNFITFVLSKSIIPMKHILGLDLGSNSIGWAFVQQDFENKQGKIIATGSRIIPMDQGILGDFERGNTVSQTAERTTYRSTRRLRERHLLRRERLHRVLHILGFLPPHYDAQIDFTKRYGKFIDNAEPKIAYNNGNFIFMNSFNEMIEDFKKHQPQLFYKKSNGEESKIPYDWTIYYLRKKALSQKITQQELAWLILHFNQKRGYYQLRGEEETENPNKEVAFHSLKVVDVEAEAPNKKGEIWYTIRLENGWIYRRTSKIPLDDWKGKTRDFIVTTDLNDDGTIKVDKEGKEKRSFRAPDENDWNLLKKKTEHDIDFSGKTVGAYIYDHLLQNPNQKIKGKLVRTIERKYYKDELKAILAKQIALQPELFTETLLADCIRELYRKNETQQQNLLSKDFLHLFVEDIIFYQRPLRSKKSTIANCTLEKRSYIDKETNERKDAPIKVCAKSNPYYQEFRVLQWLQNLRIYEIETDREVTAEFIETPQDCEALFNFLMSQKEIDNKGLLKYFLFAKNPQIKDKAAKSELKKWLTTYRWNYVYDAADNSSKKYPMNETGYELQRYLQKVEGLPANFLTFDITYQLWHLLYSVKDKVEFEKALKKFAKKKQLDKTSFVDSFKNFKPYPNEYGSFSEKAIKKLLPLMRFGNHWDFNRIDVSTQKRIDDLINGVANEDIRTIIREKAEKYQLNSETCFQDLPLWLAQYVVYNRHAEATDIEKWTSVSDLEAYLEDFKQHSLRNPIVEQVVTETLRVVRDIWQQYGGGQANFFDEIHIELGRELKKTAEERKQLSDKNQENESTNLRIKKLLAELKEDASIQNVRPYSLVQQELLKIYEEGVFSATDEVEEDIQKIRKKAEPSKADLQRYKLWLEQKYKSPYTGEVISLTKLFTEEYEIEHIIPQSRYYDDSLSNKVICESAVNKLKTNQLGLEFIQNHHGEKVRITANKEVTIFTEEQYKEFVKKHYANNSAKQQKLLLNEIPEKMVARQLNDTRYISKYISEILSKIVRSDEKDEGVNSKNIIPCTGKITTALKQDWGLNDVWNKLILPRFERMNQLTQTQLFTSYNDRLQKNLPTVPIEYSQGFQKKRIDHRHHAMDALVIACATREHINYMNNQHALDKSKDKKEKQQSRIDLRTILCEKKNNNWQFKKPWSTFTQEAKEALEHIVVSFKQNLRVINKATNYYEKWEEKNGVLVKKKVKQEGTNWAIRKPLHKETVSGKIVLDRKIGKDKILTATRKAVDITFTEKIISSITDTGIQKILLNYLKYKGSPEVAFSTEGLEELNKNIAQYNNGKKHQPIYKVRIFEEGSKFPLGETGAKATKYVEAAKGTNLFFGVYQGKGKRTYATIPLNEVIERQKQGLPSVPERNEKGEPLLFSLSPNDLVYVPMEGEIAETIDFNNLSKEQKERIYKTVSFTGNQCFFVQEAVATPIVNKMEYSPLNKMERDILGTMIKEVCIKLKVDRLGNITKA

SEQ ID NO: 382 - protein, 1450 aa, Capnocytophaga sp.
MKHILGLDLGSNSIGWAFVQQDFENKQGKIIATGSRIIPMDQGILGDFERGNTVSQTAERTTYRNTRRLRERHLLRRERLHRVLHILGFLPPHYDSQIDFTKRYGKFIDNAEPKIAYNNGNFIFMNSFNEMIEDFKKYQPQLFYKKSNGEESKIPYDWTIYYLRKKALSQKITQQELAWLILHFNQKRGYYQLRGEEETENPNKEVAFHSLEVVDVEAEAPNKKGEIWYTIRLENGWIYRRTSKIPLDDWKGKTRDFIVTTDLNDDGTIKLDKEGKEKRSFRAPDENDWNLLKKKTEHDIDFSGKTVGAYIYDHLLQNPNQKIKGKLVRTIERKYYKDELKAILAKQIALQPELFTETLLADCIRELYRKNETQQQNLLSKDFLHLFVEDIIFYQRPLRSKKSTIANCTLEKRSYIDKETNERKDTPIKVCAKSNPYYQEFRVLQWLQNLRIYEIETDREVTAEFIETAQDNEALFNFLMSQKEIDNESLLKYFLFAKNPQIKDKVAKSELKKWLTTYRWNYVYDAADNSSKKYPMNETGYELQQYLQKVEGLPANFLTFDITYRLWHLLYSVKDKVEFEKALKKFAQEYQLDEASFVDSFKNFKPYPNEYGSFSEKAIKKLLPLMRFGNHWDFNRIDVSTQKRIDDLINGVANDEIRTIIREKAEKYQLNSETCFQGLPLWLAQYVVYNRHAEAADIEKWTSVNDLEAYLEDFKQHSLRNPIVEQVITETLRVVRDIWQRYGGGQANFFDEIHIELGRELKKTAEERKQLSNRNQENENTNLRIKKLLAELKEDASIQNVRPYSPVQQELLKIYEEGVFSATDEVEEDIQKIRKKAEPTTPEIQRYKLWLEQKYKSPYTGEVISLTKLFTEEYEIEHIIPQSRYYDDSLSNKVICESAVNKLKTNQLGLEFIQNHHGEKVRITANKEVTIFTEEQYKEFVKKHYANNSAKQQKLLLNEIPEKMVARQLNDTRYISKYISEILSKIVRSDEKDEGVNSKNIIPCTGKITTALKQDWGLNDVWNELILPRFERMNQLTQTQLFTSYNDRFQKNLPTVPIEYSQGFQKKRIDHRHHAMDALVIACATREHINYMNNQHALDKSKDKKEKQQSRIDLRTILCEKKNNNWQFKKPWSTFTQEAQEALEHIVVSFKQNLRVINKATNYYEKWEEKNGVLVKKKVKQEGTNWAIRKPLHKETVSGKIVLDRKIGKDKILTATRKSVDITFTEKIISSITDTGIQKILLNYLKYKGSPEVAFSAEGLEELNKNIAQYNDGKKHQPIYKVRIFEEGSKFPLGETGAKATKYVEAAKGTNLFFGVYQGKGKRTYATIPLNEVIERQKQGLPSVPERNEKGEPLLFSLSPNDLVYVPMEGEIAETIDFNNLSKEQKERIYKTVSFTGNQCFFVQEAVATPIVNKIEYSPLNKMERDILGTMIKEVCIKLKVDRLGNITKA

SEQ ID NO: 383 - protein, 1435 aa, Capnocytophaga sp.
MKNILGLDLGTTSIGFAHIVEDENKEKSEIKELGVRIVSLATDEQSDFEKGKSISTNANRTLKHGARLNLDRYQQRRKFLIDLLQKANLITSASILAENGKNTTHSTWQLRAKAVTERIEKEEFARVLLAINKKRGYKNSRKTKTEDEGQAIDGMAIAKCLYDENLTPGQLSLQLLQQNKKLLPDFYRSDLQKEFDLVWNLQKQFYPDILTDSFYKELQGKGKDATSKAFSKRYHFDTAENKGSKESVRLQAYQWRAEAISKQLSKEEVAYVLTEINNNLNNSSGYLGAISDRSKELYFNRQTVGQYLYAQLQENRHNSLKNKVFYRQDYLDEFERIWETQASFHKELTDELKKQIRDVVIFYQRKLKSQKGLVSFCEFESKEIEIEKDGKAITKSIGARVVPKSSPLFQEFKIWQILNNVTCKRKGIRKKKSSAKSTELDLFNEPSQSIFSLDMECKQLLFDELNLKGDLKSDKVLKLLGYSPQEWEINYNQLEGNRTQKSLYEAYLKIIEIEGYEVKDILQIKSTKDDWSLDESPLSASEIRERVKVIFQTLGICTKILYFDPLLPVKEFEQQYSYQLWHLLYSYESDDSTSGNETLYRILEKKYAFKREHATILANVALQDDYGSLSTKAIRKIYPYIKENQYSTACELAGYKHSKLSLTTEELEARELKNIIPLLKKNALRNPVVEKILNQMINVVNALIEKNSERDAEGKITKYFHFDEIRIELARELKKNAQERYEMTQNINKAKLEHQKISEKLQKQFGIKNPTKSDIIRYRLYQELEHNGYKELYTNTYIAPDVLFSKNIDIEHIVPKARVFDDSFSNKTLAFKEFNIKKGESTAFDYITSLNCEGELNQYLTRVENAYKTKSISLTKYKNLLKKASEIGDGFINRDLRDTQYIAKKAKEILFQVTKNVLSTSGSITDRLREDWGLVDVMKELNMPKYQSLGLTEVEERKDGNKVTVIKDWTKRNDHRHHAMDALTVAFTKPSYIQYLNHLNARKDENNKNYSVILAIEKKETIKVPINNGKNKRVFIEPILNFRQVAKKHLEEIFISHKAKNKVVTKNINKPAGTDKQQITLTPRGQLHKETIYGKYQYYVNKEEKVGVKFDERTITKVSNPLYREALLKRLQANDNDPKKAFAGKNALSKNPIYLDEAKTKTLPEKVNLTYLEEDFSIRKDISPDNFKDLKSIEKVIDQGVKRILIKRLQAYDNDPKKAFVDLEKNPIWLNKEKGIAIKRVTISGVSNAQPLHIGKDHLGKTTLNKEGKEVPVDYVSTGNNHHVAIYRDKEGNLQEQIVSFFEAVVRAQQGLPIIDKNYKQAEGWQFMFTMKQNEMFVFPNEATGFNPAEIDLLDPKNKKLISPNLFRVQTISIVKYGNSVVRDFKFRHHLETTLQDDKILQGITFQQIKSLEPLRNIVKVRINHLGDIVNIGEY

SEQ ID NO: 384 - protein, 1432 aa, Capnocytophaga sp.
MKNILGLDLGTTSIGFAHIVEDENKEKSEIKELGVRIVSLTTDEQSDFEKGKSITTNANRTLKHGARLNLDRYQQRRKYLIDLLHKANLITPSSILAENGKNTTHSTWQLRAKAVTERIEKEEFARILLAINKKRGYKSSRKAKTEDEGQAIDGMAIAKRLYDENLTPGQLSLQLLQQNKKLLPDFYRSDLQKEFDLVWNFQKQFYPDILTDIFYKELQGKGKDATSKAFSKRYHFDTAENKGSKESVRLQAYQWRAEAVSKQLSKEEVAYVLTEINNNLNNASGYLGAISDRSKELYFNRQTVGQYLYAQLQENRHNSLKNKVFYRQDYLDEFERIWETQALFHKELTDELKKQIRDVVIFYQRKPKSQKGLISFCEFESKEIEIEKDGKTITKNIGARVVPKSSPLFQEFKIWQILNNVICKRKGIRKKKISAKTTQLDLLNESSQTIFSLDMECKQLLFDELNLKGDLKSDKVLKLLGYSPQEWEINYNQLEGNRTQKALYEAYLKIVEMEAHDVKDILQIKSTKDDWSLDESPLSASEIRESVKAIFQALGICTKILYFDPLLPVKDFEEQDSYQLWHLLYSYESDDSTSGNETLYRILEKKYAFKREHARILANVALQDDYGSLSTKAIRKIYPNIKENQYSTACEMAGYKHSKLSLTTEELEARELKNIIPLLKKNALRNPVVEKILNQMINVVNALIEKNSERDAEGKITKYFHFDEIRIELARELKKNAQKRYEMTQNINKAKSEHQKISEILQKEFGIKNPTKSDIIRYRLYKELEHNGYKELYTNTYIAPDVLFSKNIDIEHIVPKARVFDDSFSNKTLAFKDFNIKKGESTAFDYITSLKNEEKLNQYLARVENAYKTKNISPAKYKNLLKKASEIGDGFINRDLRDTQYIAKKAKEILFQVTKNVLSTSGSITDRLREDWSLVDVMKELNMPKYQSLGLTEVEERKDGNKVTVIKDWTKRNDHRHHAMDALTVAFTKPSYIQYLNHLNARKDENNKNYSVILAIEKKETIKVPTNNGKNKRVFIEPIPNFRQVAKKHLEEIFISHKAKNKVVTKNTNKPAGTNKQQITLTPRGQLHKETIYGKYQYYVNKEEKVGVKFDKETIAKVSNPLYREALLKRLQANDNDPKKAFTGKNALSKNPIYLDEAKTKTLPEKVNLTYLEEDFSVRKKIVPKNPTSKEFVPNLKSIEKVVDEGVRNILIERLRVYNNDPEKAFVDLEKNPIWLNKEKGIAIKRVTISGVNNAQPLHIGKDHLGKTTLNKEGKEIPVDYVSTGNNHHVAIYRDKEGNLQEQIVSFFEAVVRTQQGLPIIDKTYKQEEGWQFLFTMKQNEMFVFPNEATGFNPAEIDLLDPKNKKQISPNLFRVQKIATKDYFFRHHLETNVETDNVLKNTTWKREGLSGLKDIVKVRINHLGDIVSIGEY

SEQ ID NO: 385 - protein, 1426 aa, Capnocytophaga sp.
MKNILGLDLGTTSIGFTHIVEDENKEKSEIKELGVRIVSLTTDEQSDFEKGKSISTNANRTLKHGARLNLDRYQQRRKFLIDLLQKANLITSSSILAENGKNTTHSTWQLRAKAVTERIEKEEFARVLLAINKKRGYKSSRKAKTEDEGQAIDGMAIAKRLYDENLTPGQLSLQLLQQNKKLLPDFYRSDLQKEFDLVWNFQKQFYPDILTDSFYKELQGKGKDATSKAFSKRYHFDTAENKGSRESVRLQAYQWRAEAISKQLSKEEVAYVLTEINNNLNNASGYLGAISDRSKELYFNRQTVGQYLYAQLQENKHNSLKNKVFYRQDYLDEFERIWETQASFHKELTEELKKQIRDVVIFYQRKLKSQKGLISFCEFESKEIEIEKDGKTITKSIGARVVPKSSPLFQEFKIWQILNNVTCKRKGIRKKKSSAKSTELDLFNEPSQTIFSLDMECKQLLFEELNLKGDLKSDKVLKLLGYSPQEWEINYNQLEGNRTQKALYEAYLKIVEMEAHDVKDILQIKSTKDDWALEESPLSASEIRERVKAIFQTLGICTKILYFDPLLPVKEFEEQDSYQLWHLLYSYESDDSTSGNETLYRILEKKYAFKREHATILANVTLQDDYGSLSTKAIRKIYPYIKENQYSTACEKAGYKHSKLSLTTEELEARELKNIIPLLKKNALRNPVVEKILNQMINVVNALIEKNSERDAEGKITKYFHFDEIRIELARELKKNAQERYEMTQNINKAKLEHQKISGILQKEFGIKNPTKSDITRYRLYQELAHNGYNDLYTNTYIPKELLFSKNIDIEHIVSKARVFDDSFSNKTLAFREFNIKKGESTAFDYITSLNNEEELNQYLNRVENAYKTKNISPAKYKNLLKKASEIGDGFINRDLRDTQYIAKKAKEILFQVTKNVLSTSGSITDRLREDWGLVDVMKELNMPKYQSLGLTEVEERKEGNKVTVIKNWTKRNDHRHHAMDALTVAFTKPSYIQYLNHLNARKDKNNKNYSVILAIEEKETIKVPTNNGKNKRVFIEPIPNFRQVAKKHLEEIFISHKAKNKVVTKNTNKPAGTDKQQITLTPRGQLHKETVYGKYQYYVNKEEKIGVKFDKETIAKVSNPVYREALLKRLQANDNDPKKAFAGKNALSKNPIYLDEAKTKTLTEKVNLTYLEEDFSIRKDISPDNFKDLKSIEKVIDQGVKRILIKRLQDYDNDPKKAFVDLEKNPIWLNKEKGIAIKRVTISGVNNAQPLHIGKDHLGKTTLNKEGKEIPVDYVSTGNNHHVAIYRDKEGNLQEQIVSFFEAVVGAQQGLPIVDKTYKQAEGWQFLFTMKQNEMFVFPNEATGFNPAEIDLLDPKNKKQISPNLFRVQKIATKDYFFRHHLETNVDTDNVLKNTTWKREGLSGLKDIVKVRINHLGDIVSIGEY

SEQ ID NO: 386 - protein, 1450 aa, Capnocytophaga sp.
MKRILGLDLGSNSIGWAFVEQDFENKQGKIIATGSRIIPMDQGILGDFEKGNTVSQTAERTTYRSMRRLRERHLLRRERLHRVLHILGFLPPHYDAQIDFTKRYGKFIDNAEPKIAYNNGNFIFMNSFNEMIEDFKKYQPQLFYKKSNGEESKIPYDWTIYYLRKKVLSQKITQQELAWLILHFNQKRGYYQLRGEEETENPNKEVAFHSLKVVDVEAEAPNKKGEIWYTIRLENGWIYRRTSKIPLDDWKGKTRDFIVTTDLNDDGTIKVDKEGKEKRSFRAPDENDWNLLKKKTEHDIDFSGKTVGAYIYDHLLQNPNQKIKGKLVRTIERKYYKDELKAILAKQIALQPELFTETLLADCIRELYRKNETQQQNLLSKDFLHLFVEDIIFYQRPLRSKKSTIANCTLEKRSYIDKETNERKDTFIKVCAKSNPYYQEFRVLQWLQNLRIYEIETDREVTAEFIETAEDYEALFNFLMSQKEIDNEGLLKYFLFAKNPQIKDKVAKSELKKWLTTYRWNYVYDAADNSSKKYPMNETGYDLQRYLQKVEGLPANFLTFDITYRLWHLLYSVKDKVEFEKALKKFAQEYQLDEASFVDSFKNFKPYPNEYGSFSEKAIKKLLPLMRFGNHWDFNRIDVSTQKRIDDLINGVANDEIRTIIREKAEKYQLNSESCFQGLPLWLAQYVVYNRHAEATDIEKWTSVSDLETYLEDFKQHSLRNPIVEQVVTETLRVVRDIWQQYGGGQANFFDEIHIELGRELKKTAEERKQLSNRNQENENTNLRIKKLLAELKEDASIQNVRPYSPVQQELLKIYEEGVFSSTDQVEEDIQKIRKKAEPTTPEIQRYKLWLEQKYKSPYTGEVISLTKLFTEEYEIEHIIPQSRYYDDSLSNKVICESAVNKLKTNQLGLEFIQNHHGEKVRITGNKEVTIFTEEQYKEFVKKHYANNSAKQQKLLLNEIPEKMVARQLNDTRYISKYISEILSKIVRSDEKDEGVNSKNVIPCTGKITTALKQDWGLNDVWNELILPRFERMNQLTQTQLFTSYNDRFQKNLPTVPIEYSQGFQKKRIDHRHHAMDALVIACATREHINYMNNQHALDKNKDKKEKQQSRIDLRTILCEKKNNNWQFKKPWSTFTQETKEALEHIVVSFKQNLRVINKATNYYEKWEEKNGVLVKKKVKQEGTNWAIRKPLHKETVSGKIVLDRKIGKDKILTATRKEVDITFTEKIISSITDTGIQKILLNYLNYKGSPEVAFSAEGLEELNKNIAQYNDGKKHQPIYKVRIFEEGSKFPLGETGAKATKFVEAAKGTNLFFGVYQGKEKRSYATIPLNEVIERQKQGLPSVPERNEKGEPLLFSLSPNDLVYVPMEGEIAETIDFNNLSKEQKERIYKTVSFTGNQCFFVQEAVATPIVNKMEYSPLNKMERDILGTMIKEVCIKLKVDRLGNITKA

SEQ ID NO: 387 - protein, 1437 aa, Capnocytophaga sp.
MKYIKYILGLDIGSNSIGWALIQLDLLQKTKRIIATGSRIIPMDQKVLSDFGKGITISPTAQRTSYRNARHCRERHLLRRERLHRVLHILGFLPTHYDKQIDFSKRYGKFVDNTEPKIAYNERKFLFMDSFQEMLADFKIHQPDLFYTKKNGEESKIPYDWTIYYLRKKALSRKISKEELAWIILNFNQKRGYYQLREEEEENKENDFEIISSKIISVIKKDKDKKYNKYWYDIILENGLVYQAAFYNDFVYNWINQDREFIIERISLKNGTEKVKLSYLPTFDEIDKMDKKEQDKYYKKIKIKTENSIGNKTVGCYIYDHILQNPNEKIKGKLVRTIERKYYKEELKAILEKQVALQPELFTDQLFADCIRELYSKNEAQQRNLAARDFVHLFVEDIIFYQRSLRRQKSTLANCSLESRSYIDKDSHTRKEAPLKVCPKSNPYYQEFRVLQWLQNLKIYEIDTDQEVTHEFIKTLEDKQQFFDFLMNQKEIDCEELLKYFLNQTYPNAREKALKSELKKWKDTYRWNYVYDIGEKSSKKYPMNETRYELKRHLEKVANLPDDFLSSEVEYLLWHLIYSVKDKVAYEKGLKTFAQKHHLDKDSFVESFKKFKPYPSEYGSFSEKAIRKLLPLMRFGSYWDFNHIDKNTQKRIEDLITGVENEEIRTILREKAEKYQLEKETDFQDLPLWLAQYIVYNRHAEASSLEKWTSVNDLETYLNEFKQYSLRNPIVEQVVMETLRVVRDIWQQYGQGQASFFDEIHIELGRELKKTAKEREKLSKQNQKNEDINLSIKEKLKELEKYNTRAYSITHQEKYKLWLEQKHISPYTGQIISPENLFTDNYEIEHIIPQSRFFDDSLSNKVVCESIVNKAPYKDRQLGLEFIKNQGGRIVKELSTENKTIKIFTEEQYRTFIKEHYSNNPEKTKKLLLEEIPEKMVARQMNDTCYISKFISEILSKIVRSDEQDEGVHSKNVILCTGKITSALKQDWGVNDVWNDLILPRFERMNDLTQSTLFTTYNEKYQKYLPTVPMEYSNGFQKKRIDHRHHAMDAIIIACATREHINYINNQHALEKGKDKKEKQKEHDKLREKLCIKKDNKGSEENYSWIFKKPWDTFTQEVQAALEGIVVSFKQNLRVINKATNYYERWVEENGKYIKKMVKQEGTNWAIRKPLHEETISGKIYLDREEITKNDILTATRKTVDSSFDEKRIKKITDTGIQKILLNYLKYKGSPEIAFSPEGLEELNKNLSIYNDGKPHKPIYKVRIYEKGSGRFALGEKGRKYKKYVQGAPNLYFGIYQGANKRSFATIPLNEVIERQKQGRPSIPEYNEKGDPLLFSLSPNDLVYVPVEGEIIEDIDFQNLSKEQKERIYNVNDFSSTCYFTPNRIAKAIFPKEVDLQRKGDKLPGSYDTKTASLEGIQIKEVCIKLKIDRLGNISKA

SEQ ID NO: 388 - protein, 1140 aa, Catellicoccus marimammalium
MKNMTKVNVGLDVGISSAGWSVINAETNQILESGVRLFSGSDADENVNRRNQRQGRRLFRRRKLRIQEAKKYLENVFQLKDIEPKDEWNPYEIRVRALNEKVSKEELSIALLNIVKHRGISYELEDVTDEEGTNTQSFQSGLDYNRRLLKTKTVGEIQYDRLQKYGQVRGQIQTEDGLLINIFPTKNYVEEVERILETQKKYHPEIDDVFIEKIISFVTRKREYFVGPGNEKSRTDYGIYRENGETLDNLFEILIGKDKFYPEEYRAAGSSYTAQIFNLLNDLNNLRIPTTEDHHLTKAQKEEIITELKNTSRLSGGMLKLISKVTKAPKEEISGYRKDEKDKPDLHSLAYYRKQKNMLEKEGIQIADFSEELLDELATMMTLNTEPGEIRKQLNKITNQYDILTPEVIEVLVKNHTAFVATSNHKWHRFSLKLMKEFIPELLETSKEQSTILCERGFIQNRASYLDENHHFNYAELRENLYNPVVRKSTCEMLKVFTAIQEKYPNIQNVIVELPRETNEDEQKRKIKKINDNNAKRKKEILKEAQAQSGLSEEALEEKLLKTKGLYLKLMLWYEQEGKCVYSGQEIPLSDLLQNKGGYEVDHIIPISISFDDRLCNKVLVRQQLNSQKSNQTPFEYMTTHTDGHLSFHELKELVGKNKRFSKEKRELLLAEIYSNDIETRKRFINRNLVDTSYTARIVLNALQQYKKENQLSMNVSVVRGAMTNILRKKVKLDKTRETFHHHAIDASLMAVIPNIEFFKERKEWLPKSANEEVVEVEVSEEETMPEKEFKVKMRLPESFIQDVQILQRNSFAKEEVSGPQTRERNLKIKFSHQVDQKMNRKVADDTIYGTRQAQLGKDKKEETYVIGKIKDIYNYDEYVRFKKRYDKNKESFLMYHHDPQTFEKLEEILAQYPEYIEDEKGKKKKVSPFALYREENGPVTKYAKKNNGPVIKQLKYYDSKLNRKIDISHKYSTKNRQVVLQSLKPYRTDVYRNQDTGEYTLVGIDQNDGKFVNGHYGIPKSRYEEIKANNKLSEHDEFVFSLYKNSMVKVIDENGESIVVRYLSRSMPNRKNNAEIKPVEKYQFEDGEVVPVYGKCRKQMQTVFVKKGWTLLKGNTDILGNTYFVEKESENPKKMIDDK

SEQ ID NO: 389 - protein, 1419 aa, Chryseobacterium sp.
MMIKNILGLDLGTNSIGWALIKQNFENKYGEILGMGSRIIPMSQDVLGEFGKGNSVSQTAARTGYRGVRRLRERFLLRRERLHRVLNVLNFLPEHYASQIDFEKRFGKFKYETEPKLAYNNDGFFFKNSFDEMLGDFKDHQFHLLENGRKVPYDWTIYYLRKKALSQKIEKEELAWILLNFNQKRGYYQLRGEDFEEEKDRVFVRLKVDRVVDSGENIKGKILYDVYFENGWKYEKQIVKTEDWIGRTKEFIVTESILKNGDTKRTFKAVDSEKDWIAIKTKTEQEIDKSHKTVGAYIYEALLQNPKQKIKGKLVRTIERKFYREELKKILERQKEFHPELQSDDLYNDCIRELYRNNEAHQITLSKKDFVHLLLNDLIFYQRPLRSQKSSVSNCTLEFRKYKDENGVEHAQYLKTIPKSNPYYQEFRVWQWMFNLNIYRKDDDTNVTKEFLSSTEDYETLFEFLNNRKEVDQKALLRHFKLNEKTHRWNYVEDKKYPCNETKTMISTRLEKVENYPSDFLTREMEQNIWHIIYSVNDKIEYEKALKSFAHKNNLDENSFFEAFKKFPPFKSEYGSFSEKAIKKLLPLLRLGKYWNWESIDRKSQGRIEKIITGEFDGNIKDKVREKAIHLTAENDFQGLQLWLAQYIVYGRHSEASMIGKWNSADDLEEFLKGFKQHSLRNPIVEQVITETLRVVKDIWLKYGNGAKDFFSEIHIELGREMKQTKDERVDATKRITENENTNLRIKALLAEMMNDNSVENIRPYSPMQQEILKIYEDGILKSDIEIDDDILKISKTAQPSSSDLKRYKLWLEQRYKSPYTGQIIPLNKLFTSEYEIEHIIPQSRYFDDSFSNKIICESAVNKLKDNYIGLGFIKQFGGMIVECGFGKSVEIFKAEEYEDFVKKHYANNRSKRNKLLLEEIPEKMIDRQLNDTRHISKYISGVLSNIVRQEDGTDEGVNSKNIVPGNGKITTQLKQDWGLNDVWNELILPRFERMNQLTNSTDFTSWNKNHQKFLPTVPIEFSKGFSKKRIDHRHHAMDALVIACATKDHINLLNNQSAKSDTKRYDLKRKLMKFERVVYSHSKTGEKIEKEVPKQFLKPWDNFTVDAKNKMETIIVSFKQNLRVINKATNHYEKWIEKDGIKRKELIKQEGTNWAIRKPMHKETVSGKVDLPGIKIPKGKILTATRKSLDTSFDLKTINSITDTGIQKILKNYLEFKGSSELAFSPEGIEDMNKNIEKFNDGKPHQSINKVRIFELGSKFSVGQTGNKKDKYVEAAKGTNLFFAVYEDKNGKRSYETIPLNEVIERQKQGLDSVSFKNKEDFLLCPNDLVYVPSEDELENIYNIDFKNLTTEKTGNIYKVVSFSGNQIFFIRQDIAISIVNKAEFSTLNKMERAIDGSMIKENCIKLKIDRLGNIAKI

SEQ ID NO: 390 - protein, 1065 aa, Clostridium perfringens
MNKDINYALGLDIGITSVGWAVINLDLNRIEDLGVRIFNAAENPKDGSSLALPRRLARGRRRLLRRKAYRVERVRKLIVKNNILTKEELEGLFKNKEVIDVWEARVKGLDYKLSREEWAKILINFCKRRGFKSNRKNETKDKEAGQILSSISYNIEKMKETNSRTIGEYIYNEVKNSDDSYAPLRNKFGEYKMCVSRDVLREEIHTLFEKQRELGNNFASDEIEDKYFEIFNSQRPFSNFEDLEKLVGFCTFERKKHKRAPKHCISSEEFTLYEGINKLSIIKDGEKRKLSEEERTLVVNEAFNKKEIKYTTLRKLLGLSEDELFSTLTYSIDKDISKTENTKFVSLKGYHEIKRAIEKGVSKKAWQDIENNRNLLNDIAYVLTLGKTDDEIEKQLRLRNVPEELFESLLDMSFSKFNNLSIYALEKILPFMKEGYQYNEACEKAGYNFKAIYEGVRTKKLPVIEIDEIVNPVVNRALAQTRKVINSVIDKYGSPVRINIELARDLAKNFKDRKLIEKEQKENRANLDKIRENLRELMDKEPTAVEVLKYRLWEQQRGECAYTQSQIALERLFSPGYCEIDHIIPFSRSFDDSLSNKILVLGSENQRKGNKIPYEYFGEDSERWNSFEIWVKGSYLNYKKKANLLKKKFTEEEQRDWKARNLQDTKYICRYISNFVNNRLEFKESENKQKVITVNGRATAYLRSRWGLNKVREDGDKHHALDAAVVGVTTQGMVQKISKYSKAHELYTVRKNDEFVDVETGECVDVDEYKEIRKDILPRPWRGFSEELKLRLSDNPLEELKKLPIETYNEEFIKENVKPIFVSRVPFRKISGKLFKETIYSERAFKDGYFVSKKSLVDLKRGDLDNFYNYECDKKLYDAISERMKEFNYNGKKAFESPFRKPTKSGKEGPVVRSVKIKSAAPFKDGIPMNEGLVAKEGMVRIDIYEKEGKYFVVPVYRYQLAKGIVPKRAAIAGKSELKWPIMDQTYNFKFSIFKNDLIEIKYAKKDGYFGYYDGFDRHTASLVIENHDNSDRYRGIGVKTGVVEFNKYEVDVLGNYHKVNLGGN

SEQ ID NO: 391 - protein, 1099 aa, Corynebacterium accolens
MSLSYRVGIDVGTYSLGCTAIEVDDNDQPVNILSSVSLIHDSGLDPDQQKRAVTRLASSGVARRTRRLYRRRRRRMINLEKFLTSQGWETRPFEHYSDPYLPWNARVALVNGYISDDAQRGMYLSIAFRHIANHRGWRNPYWKVSSLYSPDKPSDAFEQIRKELEESTGHKIPETVTVGQLISFAQFGKDRLRGGGKKKDEKKPQEQVNQAVISARLHQIDHAREINEICRVQKIDDALRKQILDLVFAAESPKGAQIGRVGKDPLQPKLPRALKASDAFQQYRIVALAGNLRIYRDGVSTPLDRDEKLIVFNYLINLSHKEEPSWLKVAEVLNIDRGQLHGTATMTDDGERAGAAPPVHDTNRTILGCKIKPLVHWWEGANDDERAAMLKALSNSEVEDFDSPAGAQTQAFFANLDESEQEKLDSLHLPIGRAAYSEDTLMRLTSRMLDENLDLYEARLAEFDIPKDWAPPAPRIGEPVGNPAVDRVLKGVARWLEAAADEWGAPKSVVIEHVRDGFISKSKANEIDRANNARHKRNRELFKQMQENLGIDGKLRSSDLWRYQSVQRQNCQCAYCGSPITYTTCEMDHIVPRAGEGSTNTRDNLVATCHRCNLAKKNIPFAVWAAQTNIPGVSVKEALDRTRHWSEDSGMTSKDFKKFRKNVCDRLKRTVVDEPLDARSMESVAWMANELRGRVAQRFQEENTVVNVYRGELTAEARRAAGISDKLRFIDGTGKSRLDRRHHAVDAAVVAFTQNYVAETLAIRSNKKREAQLLQAAEQWKEFTGSDAEHRAAWNAWLPKMQKLAVLLQKALDEDRIAVTSNLRLRLGNGRAHEDSIGELKTIRVGDAISVTDIDRASSEALWCALTREPDFDENNGLPENPDRRIRIHGTWYDAEDDIEVFPVGAGAIKVRGGYAELSRFHHARIYKIPGKKAPVYCMLRVYNADLIRHRHEDLFSVEIKPQTMSVRQAEPKLRKALAENTAEYLGWLVTDDELVIDTSNFNTGQIAEMQSELGQVRRWRLDGFYSPSTLRLRPLQMSAEGLREDTSIGAKKIIDRPGWLPAINKLFGEGHVTVVRRDALGRARLTSNAHLPISWKAE

SEQ ID NO: 392 - protein, 1084 aa, Corynebacterium diphtheriae
MKYHVGIDVGTFSVGLAAIEVDDAGMPIKTLSLVSHIHDSGLDPDEIKSAVTRLASSGIARRTRRLYRRKRRRLQQLDKFIQRQGWPVIELEDYSDPLYPWKVRAELAASYIADEKERGEKLSVALRHIARHRGWRNPYAKVSSLYLPDGPSDAFKAIREEIKRASGQPVPETATVGQMVTLCELGTLKLRGEGGVLSARLQQSDHAREIQEICRMQEIGQELYRKIIDVVFAAESPKGSASSRVGKDPLQPGKNRALKASDAFQRYRIAALIGNLRVWVDGEKRILSVEEKNLVFDHLVNLTPKKEPEWVTIAEILGIDRGQLIGTATMTDDGERAGARPPTHDTNRSIVNSRIAPLVDWWKTASALEQHAMVKALSNAEVDDFDSPERAKVQAFFADLDDDVHAKLDSLHLPVGRAAYSEDTLVRLTRRMLSDGVDLYTARLQEFGIEPSWTPPTPRIGEPVGNPAVDRVLKTVSRWLESATKTWGAPERVIIEHVREGFVTEKRAREMDGDMRRRAARNAKLFQEMQEKLNVQGKPSRADLWRYQSVQRQNCQCAYCGSPITFSNSEMDHIVPRAGQGSTNTRENLVAVCHRCNQSKGNTPFAIWAKNTSIEGVSVKEAVERTRHWVTDTGMRSTDFKKFTKAVVERFQRATMDEEIDARSMESVAWMANELRSRVAQHFASHGTTVRVYRGSLTAEARRASGISGKLEFLDGVGKSRLDRRHHAIDAAVIAFTSDYVAETLAVRSNLKQSQAHRQEAPQWREFTGKDAEHRATWRVWCQKMEKLSALLTEDLRDDRVVVMSNVRLRLGNGSAHEETIGKLSKVKLGSQLSVSDIDKASSEALWCALTREPDFDPKDGLPANPERHIRVNGTHVYAGDNIGLFPVSAGSIALRGGYAELGSSFHHARVYKITSGKKPAFAMLRVYTIDLLPYRNQDLFSVELKPQTMSMRQAEKKLRDALATGNAEYLGWLVVDDELVVDTSKIATDQVKAVEAELGTIRRWRVDGFFGDTRLRLRPLQMSKEGIKKESAPELSKIIDRPGWLPAVNKLFSEGNVTVVRRDSLGRVRLESTAHLPVTWKVQ

SEQ ID NO: 393 - protein, 1084 aa, Corynebacterium diphtheriae
MKYHVGIDVGTFSVGLAAIEVDDAGMPIKTLSLVSHIHDSGLDPDEIKSAVTRLASSGIARRTRRLYRRKRRRLQQLDKFIQRQGWPVIELEDYSDPLYPWKVRAELAASYIADEKERGEKLSVALRHIARHRGWRNPYAKVSSLYLPDGPSDAFKAIREEIKRASGQPVPETATVGQMVTLCELGTLKLRGEGGVLSARLQQSDHAREIQEICRMQEIGQELYRKIIDVVFAAESPKGSASSRVGKDPLQPGKNRALKASDAFQRYRIAALIGNLRVRVDGEKRILSVEEKNLVFDHLVNLAPKKEPEWVTIAEILGIDRGQLIGTATMTDDGERAGARPPTHDTNRSIVNSRIAPLVDWWKTASALEQHAMVKALSNAEVDDFDSPEGAKVQAFFADLDDDVHAKLDSLHLPVGRAAYSEDTLVRLTRRMLADGVDLYTARLQEFGIEPSWTPPAPRIGEPVGNPAVDRVLKTVSRWLESATKTWGAPERVIIEHVREGFVTEKRAREMDGDMQRRAARNAKLFQEMQEKLNVQGKPSRADLWRYQSVQRQNCQCAYCGSPITFSNSEMDHIVPRAGQGSTNTRENLVAVCHRCNQSKGNTPFAIWAKNTSIEGVSVKEAVERTRHWVTDTGMRSPDFKKFTKAVVERFQRATMDEEIDARSMESVAWMANELRSRVAQHFASHGTTVRVYRGSLTAEARRASGISGKLKFFDGVGKSRLDRRHHAIDAAVIAFTSDYVAETLAVRSNLKQSQAHRQEAPQWREFTGKDAEHRAAWRVWCQKMEKLSALLTEDLRDDRVVVMSNVRLRLGNGSAHKETIGKLSKVKLGSQLSVSDIDKASSEALWCALTREPDFDPKEGLPANPERHIRVNGTHVYAGDNIGLFPVSAGSIALRGGYAELGSSFHHARVYKITSGKKPAFAMLRVYTIDLLPYRNQDLFSVELKPQTMSMRQAEKKLRDALATGNAEYLGWLVVDDELVVDTSKIATDQVKAVEAELGTIRRWRVDGFFSPSKLRLRPLQMSKEGIKKESAPELSKIIDRPGWLPAVNKLFSDGNVTVVRRDSLGRVRLESTAHLPVTWKVQ

SEQ ID NO: 394 - protein, 1084 aa, Corynebacterium diphtheriae
MKYHVGIDVGTFSVGLAAIEVDDAGMPIKTLSLVSHIHDSGLDPDKIKSAVTRLASSGIARRTRRLYRRKRRRLQQLDKFIQRQGWPVIELEDYSDPLYPWKVRAELAASYIADEKERGEKLSVALRHIARHRGWRNPYAKVSSLYLPDEPSDAFKAIREEIKRASGQPVPETATVGQMVTLCELGTLKLRGEGGVLSARLQQSDHAREIQEICRMQEIGQELYRKIIDVVFAAESPKGSASSRVGKDPLQPGKNRALKASDAFQRYRIAALIGNLRVRVDGEKRILSVEEKNLVFDHLVNLAPKKEPEWVTIAEILGIDRGQLIGTATMTDDGERAGARPPTHDTNRSIVNSRIAPLVDWWKTASALEQHAMVKALSNAEVDDFDSPEGAKVQAFFADLDDDVHAKLDSLHLPVGRAAYSEDTLVRLTRRMLADGVDLYTARLQEFGIEPSWTPPAPRIGEPVGNPAVDRVLKTVSRWLKSATKTWGAPERVIIEHVREGFVTEKRAREMDGDMRRRAARNAKLFQEMQEKLNVQGKPSRADLWRYQSVQRQNCQCAYCGSPITFSNSEMDHIVPRAGQGSTNTRENLVAVCHRCNQSKGNTPFAIWAKNTSIEGVSVKEAVERTRHWVTDTGMRSTDFKKFTKAVVERFQRATMDEEIDARSMESVAWMANELRSRVAQHFASHGTTVRVYRGSLTAEARRASGISGKLEFLDGVGKSRLDRRHHAIDAAVIAFTSDYVAETLAVRSNLKQSQAHRQEAPQWREFTGKDAEHRAAWRVWCQKMEKLSALLTEDLRDDRVVVMSNVRLRLGNGSAHEETIGKLSKVKLGSQLSVSDIDKASSEALWCALTREPDFDPKDGLPANPERHIRVNGTHVYAGDNIGLFPVSAGSIALRGGYAELGSSFHHARVYKITSGKKPAFAMLRVYTIDLLPYRNQDLFSVELKPQTMSMRQAEKKLRDALATGNAEYLGWLVVDDELVVDTSKIATDQVKAVEAELGTIRRWRVDGFFGDTRLRLRPLQMSKEGIKKESAPELSKIIDRPGWLPAVNKLFSEGNVTVVRRDSLGRVRLESTAHLPVTWKVQ

SEQ ID NO: 395 - protein, 1084 aa, Corynebacterium diphtheriae
MKYHVGIDVGTFSVGLAAIEVDDAGMPIKTLSLVSHIHDSGLDPDKIKSAVTRLASSGIARRTRRLYRRKRRRLQQLDKFIQRQGWPVIELEDYSDPLYPWKVRAELAASYIADEKERGEKLSVALRHIARHRGWRNPYAKVSSLYLPDEPSDAFKAIREEIKRASGQPVPETATVGQMVTLCELGTLKLRGEGGVLSARLQQSDHAREIQEICRMQEIGQELYRKIIDVVFAAESPKGSASSRVGKDPLQPGKNRALKASDAFQRYRIAALIGNLRVRVDGEKRILSVEEKNLVFDHLVNLAPKKEPEWVTIAEILGIDRGQLIGTATMTDDGERAGARPPTHDTNRSIVNSRIAPLVDWWKTASALEQHAMVKALSNAEVDDFDSPEGAKVQAFFADLDDDVHAKLDSLHLPVGRAAYSEDTLVRLTRRMLADGVDLYTARLQEFGIEPSWTPPAPRIGEPVGNPAVDRVLKTVSRWLESATKTWGAPERVIIEHVREGFVTEKRAREMDGDMRRRAARNAKLFQEMQEKLNVQGKPSRADLWRYQSVQRQNCQCAYCGSPITFSNSEMDHIVPRAGQGSTNTRENLVAVCHRCNQSKGNTPFAIWAKNTSIEGVSVKEAVERTRHWVTDTGMRSTDFKKFTKAVVERFQRATMDEEIDARSMESVAWMANELRSRVAQHFASHGTTVRVYRGSLTAEARRASGISGKLEFLDGVGKSRLDRRHHAIDAAVIAFTSDYVAETLAVRSNLKQSQAHRQEAPQWREFTGKDAEHRAAWRVWCQKMEKLSALLTEDLRDDRVVVMSNVRLRLGNGSAHEETIGKLSKVKLGSQLSVSDIDKASSEALWCALTREPDFDPKDGLPANPERHIRVNGTHVYAGDNIGLFPVSAGSIALRGGYAELGSSFHHARVYKITSGKKPAFAMLRVYTIDLLPYRNQDLFSVELKPQTMSMRQAEKKLRDALATGNAEYLGWLVVDDELVVDTSKIATDQVKAVEAELGTIRRWRVDGFFGDTRLRLRPLQMSKEGIKKESAPELSKIIDRPGWLPAVNKLFSEGNVTVVRRDSLGRVRLESTAHLPVTWKVQ

SEQ ID NO: 396 - protein, 1084 aa, Corynebacterium diphtheriae
MKYHVGIDVGTFSVGLAAIEVDDAGMPIKTLSLVSHIHDSGLDPDKMKSAVTRLASSGIARRTRRLYRRKRRRLQQLDKFIQRQGWPVIELEDYSDPLYPWKVRAELAASYIADEKERGEKLSVALRHIARHRGWRNPYAKVSSLYLPDEPSDAFKSIREEIKRASGQPVPETATVGQMVTLCELGTLKLRGEGGVLSARLQQSDHAREIQEICRMQEIGQELYRKIIDVVFAAESPKGSASSRVGKDPLQPGKNRALKASDSFQRYRIAALISNLRVRVDGEKRILSVEEKNLVFDHLVNLAPKKEPEWVTIAEILGIDRGQLIGTATMTDDGERAGARPPTHDTNRSIVNSRIAPLVDWWKTASALEQHAMVKALSNAEVDDFDSPEGAKVQAFFADLDDDVHAKLDSLHLPVGRAAYSEDTLVRLTRRMLADGVDLYTARLQEFGIEPSWTPPAPRIGEPVGNPAVDRVLKTVSRWLESATKTWGAPERVIIEHVRDGFVTEKRAREMDGDMRRRAARNAKLFQEMQEKLNVQGKPSRADLWRYQSVQRQNCQCAYCGSPITFSNSEMDHIVPRAGQGSTNTRENLVAVCHRCNQSKGNTPFAIWAKNTSIEGVSVKEAVERTRHWVTDTGMRSTDFKKFTKAVVERFQRATMDEEIDARSMESVAWMANELRSRVAQHFASHGTTVRVYRGSLTAEARRASGISGKLEFLDGVGKSRLDRRHHAIDAAVIAFTSDYVAETLAVRSNLKQSQAHRQEAPQWREFTGKDAEHRAAWRVWCQKMEKLSALLTEDLRDDRVVVMSNVRLRLGNGSAHEETIGKLSKVKLGSQLSVSDIDKASSEALWCALTREPDFDPKDGLPANPERHIRVNGTHVYAGDNIGLFPVSAGSIALRGGYAELGSSFHHARVYKITSGKKPAFAMLRVYTIDLLPYRNQDLFSVELKPQTMSMRQAEKKLRDALATGNAEYLGWLVVDDELVVDTSKIATDQVKAVEAELGTIRRWRVDGFFGDTRLRLRPLQMSKEGIKKELAPELSKIIDRPGWLPAVNKLFSEGNVTVVRRDSLGRVRLESTAHLPVTWKVQ

SEQ ID NO: 397 - protein, 1084 aa, Corynebacterium diphtheriae
MKYHVGIDVGTFSVGLAAIEVDDAGMPIKTLSLVSHIHDSGLDPDKMKSAVTRLASSGIARRTRRLYRRKRRRLQQLDKFIQRQGWPVIELEDYSDPLYPWKVRAELAASYIADEKERGEKLSVALRHIARHRGWRNPYAKVSSLYLPDEPSDAFKSIREEIKRASGQPVPETATVGQMVTLCELGTLKLRGEGGVLSARLQQSDHAREIQEICRMQEIGQELYRKIIDVVFAAESPKGSASSRVGKDPLQPGKNRALKASDAFQRYRIAALIGNLRVRVDGEKRILSVEEKNLVFDHLVNLAPKKEPEWVTIAEILGIDRGQLIGTATMTDDGERAGARPPTHDTNRSIVNSRIAPLVDWWKTASALEQHAMVKALSNAEVDDFDSPEGAKVQAFFADLDDDVHAKLDSLHLPVGRAAYSEDTLVRLTRRMLADGVDLYTARLQEFGIEPSWTPPAPRIGEPVGNPAVDRVLKTVSRWLESATKTWGAPERVIIEHVREGFVTEKRAREMDGDMRRRAARNAKLFQEMQEKLNVQGKPSRADLWRYQSVQRQNCQCAYCGSPITFSNSEMDHIVPRAGQGSTNTRENLVAVCHRCNQSKGNTPFAIWAKNTSIEGVSVKEAVERTRHWVTDTGMRSTDFKKFTKAVVERFQRATMDEEIDARSMESVAWMANELRSRVAQHFASHGTTVRVYRGSLTAEARRASGISGKLEFLDGVGKSRLDRRHHAIDAAVIAFTSDYVAETLAVRSNLKQSQAHRQEAPQWREFTGKDAEHRAAWRVWCQKMEKLSALLTEDLRDDRVVVMSNVRLRLGNGSAHEETIGKLSKVKLGSQLSVSDIDKASSEALWCALTREPDFDPKDGLPANPERHIRVNGTHVYAGDNIGLFPVSAGSIALRGGYAELGSSFHHARVYKITSGKKPAFAMLRVYTIDLLPYRNQDLFSVELKPQTMSMRQAEKKLRDALATGNAEYLGWLVVDDELVVDTSKIATDQVKAVEAELGTIRRWRVDGFFGDTRLRLRPLQMSKEGIKKESAPELSKIIDRPGWLPAVNKLFSEGNVTVVRRDSLGRVRLESTAHLPVTWKVQ

SEQ ID NO: 398 - protein, 1084 aa, Corynebacterium diphtheriae
MKYHVGIDVGTFSVGLAAIEVDDAGMPIKTLSLVSHIHDSRLDPDKIKSAVTRLASSGIARRTRRLYRRKRRRLQQLDKFIQRQGWPVIELEDYSDPLYPWKVRAELAASYIADEKERGEKLSVALRHIARHRGWRNPYAKVSSLYLPDEPSDAFKAIREEIKRASGQPVPETATVGQMVTLCELGTLKLRGEGGVLSARLQQSDHAREIQEICRMQEIGQELYRKIIDVVFAAESPKGSASSRVGKDPLQPGKNRALKASDAFQRYRIAALIGNLRVRVDGEKRILSVEEKNLVFDHLVNLAPKKEPEWVTIAEILGIDRGQLIGTATMTDDGERAGARPPTHDTNRSIVNSRIAPLVDWWKTASALEQHAMVKALSNAEVDDFDSPEGAKVQAFFADLDDDVHAKLDSLHLPVGRAAYSEDTLVRLTRRMLADGVDLYTARLQEFGIEPSWTPPAPRIGEPVGNPAVDRVLKTVSRWLESATKTWGAPERVIIEHVREGFVTEKRAREMDGDMRRRAARNAKLFQEMQEKLNIQGKPSRADLWRYQSVQRQNCQCAYCGSPITFSNSEMDHIVPRAGQGSTNTRENLVAVCHRCNQSKGNTPFAIWAKNTSIEGVSVKEAVERTRHWVTDTGMRSTDFKKFTKAVVERFQRVTMDEEIDARSMESVAWMANELRSRVAQHFASRGTTVRVYRGSLTAEARRASGISGKLEFLDGVGKSRLDRRHHAIDAAVIAFTSDYVAETLAVRSNLKQSQAHRQEAPQWREFTGKDAEHRAAWRVWCQKMEKLSALLTEDLRDDRVVVMSNVRLRLGNGSAHEETIGKLSKVKLGSQLSVSDIDKASSEALWCALTREPDFDPKDGLPANPERHIRVNGTHVYAGDNIGLFPVSAGSIALRGGYAELGSSFHHARVYKITSGKKPAFAMLRVYTIDLLPYRNQDLFSVELKPQTMSMRQAEKKLRDALATGNAEYLGWLVVDDELVVDTSKIATDQVKAVEAELGTIRRWRVDGFFGDTRLRLRPLQMSKEGIKKESAPELSKIIDRPGWLPAVNKLFSEGNVTVVRRDSLGRVRLESTAHLPVTWKVQ

SEQ ID NO: 399 - protein, 1069 aa, Corynebacterium matruchotii
MAAIAIDDDGKPTEILSAISLIHDSGVDPDSAKSAATRLATSGIARRTRRLYRRKRKRLAKLDKFISSQGWPLKEFEKYEDPFYPWRVRAELATTAITDQQELGEKLSIALRHIARHRGWRNPYSKVTALYTVTEPSDAFLAMQEECAKQLGRTIPETITVGQLVTGMNLGKTRLRGENSLLAARPRQSDNANEIHTIAKVQGLSNELVRQIIDHVFAAESPKGSAAEQVGKDPLQPTKKRALKASDAFQQYRIAALIGNLRIRGGKGNRRLTTEETRLVFDYLRSLPAKQEPTWQLVAEQLKIDRGNLVGTAIMTDDGERAGAKPPVHDTNRIMENTKIKPLATWWKSADADARAAMVKALSNAEVDDFDSQAGAQVQEFFFGISDEDQEKLDGLHLPIGRAAYSEDTLDRLTKRMIGEGMDLYEARQAEFKISNDWAPPAPEIGERVGNPAVDRVLKATARWLNAAERQWGAPKSVNIEHVRAAFMSESSARELDRDNQQRAKRNVKVVAEMQEKLGIEGRPSRADVWRFQSIQRQNGKCAYCGAEISFKNSEMDHIIPQVGEGSTNTRDNLVAVCRECNSSKSNIAFAVWAENTSRPGVSVQKAIERTHHWVTDSGLRKPEFDKFRKQVCDRLRRKATDEPIDARSLESVAWMANELRSRIAQKFKDGDTKVRVYKGALTAEARRASGISGKLEFVDGKGKSRLDRRHHAVDAAVVAFTSNYVAETLALRSNMKFDQELRRKAPQWREFTGSDHVHQVEWTKWKYRMQALAELLNNALVQDRIVVMHNLRLRLGNGAAHEDTIGKLTRLKVGDAISTTDIDRASSEALWCALTRDPDYDPKTGLPENPNRTIRIHGTHLTASDEITVFPVAAASIPIRDGFAKLGSNYHHVRLFRVPSGKKYKYCLMQVYTVDLLKFRKEDLFTVELKPQTISVRTCEALLRKALANGTAEYLGWLVSDDELLIDTSSFDTPGIVKLREEYGPVNRWRLAGLTSVTRLNLRPLYLSKEGLKPNVNPEIKKIIDNRSWIITVNKLFSSGHVKIIRRDALGRPRLHSAAHLPICWEVK

SEQ ID NO: 400 - protein, 210 aa, Diplosphaera colitermitum
MSDILDKPIVLSLNRAWQVIGHRTVKQALVALNGGNADLPPALGLDIAYPKFDDGAWNFDRPLFLNPLPWSEWIELPVRDFDFAITTPRLRIRVPTVIVATQFAKMPVRIPRLTREAIFERDGGVCQYTGEHVGKHGGNLDHVVPRDRGGRDSFENLVWAKREINSLKANRLPHEAGLRLLRRPKAPAPLPASMTIREARHPDWRHFLTP

SEQ ID NO: 401 - protein, 1332 aa, Dolosigranulum pigrum
MQKNYTIGLDIGTNSVGWAVMKDDYTLIRKRMKVLGNTDIKKIKKNFWGVRLFDEGETAKETRLKRGTRRRYQRRRNRLIYLQDIFQQPMLAIDENFFHRLDDSFFVPDDKSYDRHPIFGSLEEEVAYHNTYPTIYHLRKHLADNPEKADLRLVYTALAHIVKYRGHFLIEGELNTENTSISETFEQFLDTYSDIFKEQLVGDISKVEEILSSKQSRSRKHEQIMALFPNENKLGNFGRFMMLIVGNTSNFKPVFDLDDEYKLKLSDETYEEDLDTLLGMTDDVFLDVFMAAKNVYDAVEMSAIISTDTGNSKAVLSNQMINFYDEHKVDLAQLKQFFKTHLPDKYYECFSDPSKNGYAGYIDGKTNQEDFYKYIEKVMKTIKSDKKDYFLDKIDREVFLRKQRSFYNSVIPHQIHLQEMQAILDRQSQYYPFLAENRDKIESLVTFRIPYYVGPLTVSDQSEFAWMERQSDEPIRPWNFDEIVNKERSAEKFIERMTNMDTYLLEEKVLPKRSLLYQTFEVYNELTKVRYTNEQGKTEKLNRQQKAEIIETLFKQKNRVREKDIANYLEQYGYVDGTDIKGVEDKFNASLSTYNDLAKIDGAKAYLDDPEYADVWEDIIKILTIFEDKAMRKKQLQTYSDTLSPEILKKLERKHYTGWGRFSKKLINGLRDEGSNKTILDYLKSDEGSSGPTNRNFMQLIRDNTLSFKKKIEDAQTIEDTTHIYDTVAELPGSPAIKKGIRQALKIVEEIIDIIGYEPENIVVEMARESQTTKKGKDLSKERLEKLTEAIKEFDGPSDVKVKDLKNENLRNDRLYLYYLQNGRDMYTNEPLDINNLSKYDIDHIIPQSFTTDNSIDNKVLVSRTKNQGNKSDDVPSINIVHKMKPFWRQLHKAGLISDRKFKNLTKAEHGGLTEADRAHFLNRQLVETRQITKHVANLLDSQYNTAEEQRINIVLLKSSMTSRFRKEFKLYKVREINDYHHGHDAYLNAVVATTIMKVYPNLKPQFVYGQYKKTSMFKEEKATARKHFYSNITKFFKKEKVVNEETGEILWDTERHLSTIKRVLSWKQMNIVKKVEKQKGQLWKETIYPKGDSSKLIPVKEGMDPQKYGGLSQVSEAFAVVITHEKGKKKQLKSDLISIPIVDQKAYEQHPTAYLEEAGYNNPTVLHELFKYQLFELEDGSRRMIASAKEFQKGNQMVLPLELVELLYHANRYDKVKFPDSIEYVHDNLAKFDDLLEYVIDFSNKYINADKNVQKIQKIYKEHGTEDVELTVESFVNLMTFTAMGAPATFKFYGESITRSRYTSITEFRGSTLIFQSITGLYETRYKLEDN

SEQ ID NO: 402 - protein, 921 aa, Enterococcus faecalis
MIPHQIHLAELQAIIHRQAAYYPFLKENQEKIEQLVTFRIPYYVGPLSKGDASTFAWLKRQSEEPIRPWNLQETVDLDQSATAFIERMTNFDTYLPSEKVLPKHSLLYEKFMVFNELTKISYTDDRGIKANFSGKEKEKIFDYLFKTRRKVKKKDIIQFYRNEYNTEIVTLSGLEEDQFNASFSTYQDLLKCGLTRAELDHPDNAEKLEDIIKILTIFEDRQRIRTQLSTFKGQFSAEVLKKLERKHYTGWGRLSKKLINGIYDKESGKTILGYLIKDDGVSKHYNRNFMQLINDSQLSFKNAIQKAQSSEHEETLSETVNELAGSPAIKKGIYQSLKIVDELVAIMGYAPKRIVVEMARENQTTSTGKRRSIQRLKIVEKAMAEIGSNLLKEQPTTNEQLRDTRLFLYYMQNGKDMYTGDELSLHRLSHYDIDHIIPQSFMKDDSLDNLVLVGSTENRGKSDDVPSKEVVKDMKAYWEKLYAAGLISQRKFQRLTKGEQGGLTLEDKAHFIQRQLVETRQITKNVAGILDQRYNANSKEKKVQIITLKASLTSQFRSIFGLYKVREVNDYHHGQDAYLNCVVATTLLKVYPNLAPEFVYGEYPKFQTFKENKATAKAIIYTNLLRFFTEDEPRFTKDGEILWSNSYLKTIKKELNYHQMNIVKKVEVQKGGFSKESIKPKGPSNKLIPVKNGLDPQKYGGFDSPIVAYTVLFTHEKGKKPLIKQEILGITIMEKTRFEQNRILFLEEKGFLRPRVLMKLPKYTLYEFPEGRRRLLASAKEAQKGNQMVLPEHLLTLLYHAKQCLLPNQSESLTYVEQHQPEFQEILERVVDFAEVHTLAKSKVQQIVKLFEANQTADVKEIAASFIQLMQFNAMGAPSTFKFFQKDIERARYTSIKEIFDATIIYQSTTGLYETRRKVVD

SEQ ID NO: 403 - protein, 1337 aa, Enterococcus faecalis; identical to SEQ ID NO: 115

SEQ ID NO: 404 - protein, 1337 aa, Enterococcus faecalis
MKKDYVIGLDIGTNSVGWAVMTEDYQLVKKKMPIYGNTEKKKIKKNFWGVRLFEEGHTAEDRRLKRTARRRISRRRNRLRYLQAFFEEAMTALDENFFARLQESFLVPEDKKWHRHPIFAKLEDEVAYHETYPTIYHLRKKLADSSEQADLRLIYLALAHIVKYRGHFLIEGKLSTENISVKEQFQQFMIIYNQTFVNGESRLVSAPLPESVLIEEELTEKASRTKKSEKVLQQFPQEKANGLFGQFLKLMVGNKADFKKVFGLEEEAKITYASESYEEDLEGILAKVGDEYSDVFLAAKNVYDAVELSTILADSDKKSHAKLSSSMIVRFTEHQEDLKNFKRFIRENCPDEYDNLFKNEQKDGYAGYITHAGKVSQLKFYQYVKKIIQDIAGAEYFLEKIAQENFLRKQRTFDNGVIPHQIHLAELQAIIHRQAAYYPFLKENQEKIEQLVTFRIPYYVGPLSKGDANTFAWLKRQSEEPIRPWNLQETVDLDQSATAFIERMTNFDTYLPSEKVLPKHSLLYEKFMVFNELTKISYTDDRGIKANFSGKEKEKIFDYLFKTRRKVKKKDIIQFYRNEYNTEIVTLSGLEEDQFNASFSTYQDLLKCGLTRAELDHPDNAEKLEDIIKILTIFEDRQRIRTQLSTFKGQFSAEVLKKLERKHYTGWGRLSKKLINGIYDKESGKTILDYLIKDDGVSKHYNRNFMQLINDSQLSFKNAIQKAQSSEHEETLSETVNELAGSPAIKKGIYQSLKIVDELVAIMGYAPKRIVVEMARENQTTSTGKRRSIQRLKIVEKAMAEIGSNLLKEQPTTNEQLRDTRLFLYYMQNGKDMYTGDELSLHRLSHYDIDHIIPQSFMKDDSLDNLVLVGSTENRGKSDDVPSKEVVKDMKAYWEKLYAAGLISQRKFQRLTKGEQGGLTLEDKAHFIQRQLVETRQITKNVAGILDQRYNAKSKEKKVQIITLKASLTSQFRSIFGLYKVREVNDYHHGQDAYLNCVVATTLLKVYPNLAPEFVYGEYPKFQTFKENKATAKAIIYTNLLRFFTEDEPRFTKDGEILWSNSYLKTIKKELNYHQMNIVKKVEVQKGGFSKESIKPKGPSNKLIPVKNGLDPQKYGGFDSPIVAYTVLFTHEKGKKPLIKQEILGITIMEKTRFEQNPILFLEEKGFLRPRVLMKLPKYTLYQFPEGRRRLLASAKEAQKGNQMVLPEHLLTLLYHAKQCLLPNQSESLAYVEQHQPEFQEILERVVDFAEVHTLAKSKVQQIVKLFEANQTADVKEIAASFIQLMQFNAMGAPSTFKFFQKDIERARYTSIKEIFDATIIYQSTTGLYETRRKVVD

SEQ ID NO: 405 - protein, 1337 aa, Enterococcus faecalis
MKKDYVIGLDIGTNSVGWAVMTEDYQLVKKKMPIYGNTEKKKIKKNFWGVRLFEEGHTAEDRRLKRTARRRISRRRNRLRYLQAFFEEAMTALDENFFARLQESFLVPEDKKWHRHPIFAKLEDEVAYHETYPTIYHLRKKLADSSEQADLRLIYLALAHIVKYRGHFLIEGKLSTENISVKEQFQQFMIIYNQTFVNGESRLVSTPLPESVLIEEELTEKASRTKKSEKVLQQFPQEKANGLFGQFLKLMVGNKADFKKVFGLEEEAKITYASESYEEDLEGILAKVGDEYSDVFLAAKNVYDAVELSTILADSDKKSHAKLSSSMIVRFTEHQEDLKNFKRFIRENCPDEYDNLFKNEQKDGYAGYITHAGKVSQLKFYQYVKKIIQDIAGAEYFLEKIAQENFLRKQRTFDNGVIPHQIHLAELQAIIHRQAAYYPFLKENQEKIEQLVTFRIPYYVGPLSKGDASTFAWLKRQSEEPIRPWNLQETVDLDQSATAFIERMTNFDTYLPSEKVLPKHSLLYEKFMVFNELTKISYTDDRGIKANFSGKEKEKIFDYLFKTRRKVKKKDIIQFYRNEYNTEIVTLSGLEEDQFNASFSTYQDLLKCGLTRAELDHPDNAEKLEDIIKILTIFEDRQRIRTQLSTFKGQFSAEVLKKLERKHYTGWGRLSKKLINGIYDKESGKTILDYLVKDDGVSKHYNRNFMQLINDSQLSFKNAIQKAQSSEHEETLSETVNELAGSPAIKKGIYQSLKIVDELVAIMGYAPKRIVVEMARENQTTSTGKRRSIQRLKIVEKAMAEIGSNLLKEQPTTNEQLRDTRLFLYYMQNGKDMYTGDELSLHRLSHYDIDHIIPQSFMKDDSLDNLVLVGSTENRGKSDDVPSKEVVKDMKAYWEKLYAAGLISQRKFQRLTKGEQGGLTLEDKAHFIQRQLVETRQITKNVAGILDQRYNAKSKEKKVQIITLKASLTSQFRSIFGLYKVREVNDYHHGQDAYLNCVVATTLLKVYPNLAPEFVYGEYPKFQTFKENKATAKAIIYTNLLRFFTEDEPRFTKDGEILWSNSYLKTIKKELNYHQMNIVKKVEVQKGGFSKESIKPKGPSNKLIPVKNGLDPQKYGGFDSPIVAYTVLFTHEKGKKPLIKQEILGITIMEKTRFEQNPILFLEEKGFLRPRVLMKLPKYTLYEFPEGRRRLLASAKEAQKGNQMVLPEHLLTLLYHAKQCLLPNQSESLAYVEQHQPEFQEILERVVDFAEVHTLAKSKVQQIVKLFEANQTADVKEIAASFIQLMQFNAMGAPSTFKFFQKDIERARYTSIKEIFDATIIYQSTTGLYETRRKVVD

SEQ ID NO: 406 - protein, 1337 aa, Enterococcus faecalis
MKKDYVIGLDIGTNSVGWAVMTEDYQLVKKKMPIYGNTEKKKIKKNFWGVRLFEEGHTAEDRRLKRTARRRISRRRNRLRYLQAFFEEAMTDLDENFFARLQESFLVPEDKKWHRHPIFAKLEDEVAYHETYPTIYHLRKKLADSSEQADLRLIYLALAHIVKYRGHFLIEGKLSTENISVKEQFQQFMIIYNQTFVNGESRLVSAPLPESVLIEEELTEKASRTKKSEKVLQQFPQEKANGLFGQFLKLMVGNKADFKKVFGLEEEAKITYASESYEEDLEGILAKVGDEYSDVFLAAKNVYDAVELSTILADSDKKSHAKLSSSMIVRFTEHQEDLKKFKRFIRENCPDEYDNLFKNEQKDGYAGYIAHAGKVSQLKFYQYVKKIIQDIAGAEYFLEKIAQENFLRKQRTFDNGVIPHQIHLAELQAIIHRQAAYYPFLKENQEKIEQLVTFRIPYYVGPLSKGDASTFAWLKRQSEEPIRPWNLQETVDLDQSATAFIERMTNFDTYLPSEKVLPKHSLLYEKFMVFNELTKISYTDDRGIKANFSGKEKEKIFDYLFKTRRKVKKKDIIQFYRNEYNTEIVTLSGLEEDQFNASFSTYQDLLKCGLTRAELDHPDNAEKLEDIIKILTIFEDRQRIRTQLSTFKGQFSAEVLKKLERKHYTGWGRLSKKLINGIYDKESGKTILGYLIKDDGVSKHYNRNFMQLINDSQLSFKNAIQKAQSSEHEETLSETVNELAGSPAIKKGIYQSLKIVDELVAIMGYAPKRIVVEMARENQTTSTGKRRSIQRLKIVEKAMAEIGSNLLKEQPTTNEQLRDTRLFLYYMQNGKDMYTGDELSLHRLSHYDIDHIIPQSFMKDDSLDNLVLVGSTENRGKSDDVPSKEVVKDMKAYWEKLYAAGLISQRKFQRLTKGEQGGLTLEDKAHFIQRQLVETRQITKNVAGILDQRYNANSKEKKVQIITLKASLTSQFRSIFGLYKVREVNDYHHGQDAYLNCVVATTLLKVYPNLAPEFVYGEYPKFQTFKENKATAKAIIYTNLLRFFTEDEPRFTKDGEILWSNSYLKTIKKELNYHQMNIVKKVEVQKGGFSKESIKPKGPSNKLIPVKNGLDPQKYGGFDSPIVAYTVLFTHEKGKKPLIKQEILGITIMEKTRFEQNPILFLEEKGFLRPRVLMKLPKYTLYEFPEGRRRLLASAKEAQKGNQMVLPEHLLTLLYHAKQCLLPNQSESLAYVEQHQPEFQEILERVVDFAEVHTLAKSKVQQIVKLFEANQTADVKEIAASFIQLMQFNAMGAPSTFKFFQKDIERARYTSIKEIFDATIIYQSTTGLYETRRKVVD

SEQ ID NO: 407 - protein, 936 aa, Enterococcus faecalis
MKKDYVIGLDIGTNSVGWAVMTEDYQLVKKKMPIYGNTEKKKIKKNFWGVRLFEEGHTAEDRRLKRTARRRISRRRNRLRYLQAFFEEAMTDLDENFFARLQESFLVPEDKKWHRHPIFAKLEDEVAYHETYPTIYHLRKKLADSSEQADLRLIYLALAHIVKYRGHFLIEGKLSTENISVKEQFQQFMIIYNQTFVNGESRLVSAPLPESVLIEEELTEKASRTKKSEKVLQQFPQEKANGLFGQFLKLMVGNKADFKKVFGLEEEAKITYASESYEEDLEGILAKVGDEYSDVFLAAKNVYDAVELSTILADSDKKSHAKLSSSMIVRFTEHQEDLKKFKRFIRENCPDEYDNLFKNEQKDGYAGYIAHAGKVSQLKFYQYVKKIIQDIAGAEYFLEKIAQENFLRKQRTFDNGVIPHQIHLAELQAIIHRQAAYYPFLKENQEKIEQLVTFRIPYYVGPLSKGDASTFAWLKRQSEEPIRPWNLQETVDLDQSATAFIERMTNFDTYLPSEKVLPKHSLLYEKFMVFNELTKISYTDDRGIKANFSGKEKEKIFDYLFKTRRKVKKKDIIQFYRNEYNTEIVTLSGLEEDQFNASFSTYQDLLKCGLTRAELDHPDNAEKLEDIIKILTIFEDRQRIRTQLSTFKGQFSAEVLKKLERKHYTGWGRLSKKLINGIYDKESGKTILGYLIKDDGVSKHYNRNFMQLINDSQLSFKNAIQKAQSSEHEETLSETVNELAGSPAIKKGIYQSLKIVDELVAIMGYAPKRIVVEMARENQTTSTGKRRSIQRLKIVEKAMAEIGSNLLKEQPTTNEQLRDTRLFLYYMQNGKDMYTGDELSLHRLSHYDIDHIIPQSFMKDDSLDNLVLVGSTENRGKSDDVPSKEVVKDMKAYWEKLYAAGLISQRKFQRLTKGEQGGLTLEDKAHFIQRQLVETR

SEQ ID NO: 408 - protein, 1337 aa, Enterococcus faecalis
MKKDYVIGLDIGTNSVGWAVMTEDYQLVKKKMPIYGNTEKKKIKKNFWGVRLFEEGHTAEDRRLKRTARRRISRRRNRLRYLQAFFEEAMTDLDENFFARLQESFLVPEDKKWHRHPIFAKLEDEVAYHETYPTIYHLRKKLADSSEQADLRLIYLALAHIVKYRGHFLIEGKLSTENISVKEQFQQFMIIYNQTFVNGESRLVSAPLPESVLIEEELTEKASRTKKSEKVLQQFPQEKANGLFGQFLKLMVGNKADFKKVFGLEEEAKITYASESYEEDLEGILAKVGDEYSDVFLAAKNVYDAVELSTILADSDKKSHAKLSSSMIVRFTEHQEDLKKFKRFIRENCPDEYDNLFKNEQKDGYAGYIAHAGKVSQLKFYQYVKKIIQDIAGAEYFLEKIAQENFLRKQRTFDNGVIPHQIHLAELQAIIHRQAAYYPFLKENQEKIEQLVTFRIPYYVGPLSKGDASTFAWLKRQSEEPIRPWNLQETVDLDQSATAFIERMTNFDTYLPSEKVLPKHSLLYEKFMVFNELTKISYTDDRGIKANFSGKEKEKIFDYLFKTRRKVKKKDIIQFYRNEYNTEIVTLSGLEEDQFNASFSTYQDLLKCGLTRAELDHPDNAEKLEDIIKILTIFEDRQRIRTQLSTFKGQFSAEVLKKLERKHYTGWGRLSKKLINGIYDKESGKTILDYLVKDDGVSKHYNRNFMQLINDSQLSFKNAIQKAQSSEHEETLSETVNELAGSPAIKKGIYQSLKIVDELVAIMGYAPKRIVVEMARENQTTSTGKRRSIQRLKIVEKAMAEIGSNLLKEQPTTNEQLRDTRLFLYYMQNGKDMYTGDELSLHRLSHYDIDHIIPQSFMKDDSLDNLVLVGSTENRGKSDDVPSKEVVKDMKAYWEKLYAAGLISQRKFQRLTKGEQGGLTLEDKAHFIQRQLVETRQITKNVAGILNQRYNANSKEKKVQIITLKASLTSQFRSIFGLYKVREVNDYHHGQDAYLNCVVATTLLKVYPNLAPEFVYGEYPKFQTFKENKATAKAIIYTNLLRFFTEDEPRFTKDGEILWSNSYLKTIKKELNYHQMNIVKKVEVQKGGFSKESIKPKGPSNKLIPVKNGLDPQKYGGFDSPVVAYTVLFTHEKGKKPLIKQEILGITIMEKTRFEQNPILFLEEKGFLRPRVLMKLPKYTLYEFPEGRRRLLASAKEAQKGNQMVLPEHLLTLLYHAKQCLLPNQSESLAYVEQHQPEFQEILERVVDFAEVHTLAKSKVQQIVKLFEANQTADVKEIAASFIQLMQFNAMGAPSTFKFFQKDIERARYTSIKEIFDATIIYQSTTGLYETRRKVVD

SEQ ID NO: 409 - protein, 1337 aa, Enterococcus faecalis
MKKDYVIGLDIGTNSVGWAVMTEDYQLVKKKMPIYGNTEKKKIKKNFWGVRLFEEGHTAEDRRLKRTARRRISRRRNRLRYLQAFFEEAMTDLDENFFARLQESFLVPEDKKWHRHPIFAKLEDEVAYHETYPTIYHLRKKLADSSEQADLRLIYLALAHIVKYRGHFLIEGKLSTENISVKEQFQQFMIIYNQTFVNGESRLVSAPLPESVLIEEELTEKASRTKKSEKVLQQFPQEKANGLFGQFLKLMVGNKADFKKVFGLEEEAKITYASESYEEDLEGILAKVGDEYSDVFLAAKNVYDAVELSTILADSDKKSHAKLSSSMIVRFTEHQEDLKKFKRFIRENCPDEYDNLFKNEQKDGYAGYIAHAGKVSQLKFYQYVKKIIQDIAGAEYFLEKIAQENFLRKQRTFDNGVIPHQIHLAELQAIIHRQAAYYPFLKENQEKIEQLVTFRIPYYVGPLSKGDASTFAWLKRQSEEPIRPWNLQETVDLDQSATAFIERMTNFDTYLPSEKVLPKHSLLYEKFMVFNELTKISYTDDRGIKANFSGKEKEKIFDYLFKTRRKVKKKDIIQFYRNEYNTEIVTLSGLEEDQFNASFSTYQDLLKCGLTRAELDHPDNAEKLEDIIKILTIFEDRQRIRTQLSTFKGQFSAEVLKKLERKHYTGWGRLSKKLINGIYDKESGKTILGYLIKDDGVSKHYNRNFMQLINDSQLSFKNAIQKAQSSEHEETLSETVNELAGSPAIKKGIYQSLKIVDELVAIMGYAPKRIVVEMARENQTTSTGKRRSIQRLKIVEKAMAEIGSNLLKEQPTTNEQLRDTRLFLYYMQNGKDMYTGDELSLHRLSHYDIDHIIPQSFMKDDSLDNLVLVGSTENLGKSDDVPSKEVVKDMKAYWEKLYAAGLISQRKFQRLTKGEQGGLTLEDKAHFIQRQLVETRQITKNVAGILDQRYNANSKEKKVQIITLKASLTSQFRSIFGLYKVREVNDYHHGQDAYLNCVVATTLLKVYPNLAPEFVYGEYPKFQTFKENKATAKAIIYTNLLRFFTEDEPRFTKDGEILWSNSYLKTIKKELNYHQMNIVKKVEVQKGGFSKESIKPKGPSNKLIPVKNGLDPQKYGGFDSPIVAYTVLFTHEKGKKPLIKQEILGITIMEKTRFEQNPILFLEEKGFLRPRVLMKLPKYTLYEFPEGRRRLLASAKEAQKGNQMVLPEHLLTLLYHAKQCLLPNQSESLAYVEQHQPEFQEILERVVDFAEVHTLAKSKVQQIVKLFEANQTADVKEIAASFIQLMQFNAMGAPSTFKFFQKDIERARYTSIKEIFDATIIYQSTTGLYETRRKVVD

SEQ ID NO: 410 - protein, 1337 aa, Enterococcus faecalis
MKKDYVIGLDIGTNSVGWAVMTEDYQLVKKKMPIYGNTEKKKIKKNFWGVRLFEEGHTAEDRRLKRTARRRISRRRNRLRYLQAFFEEAMTDLDENFFARLQESFLVPEDKKWHRHPIFAKLEDEVAYHETYPTIYHLRKKLADSSEQADLRLIYLALAHIVKYRGHFLIEGKLSTENTSVKEQFQQFMVIYNQTFVNGESRLVSAPLPESVLIEEELTEKASRTKKSEKVLQQFPQEKANGLFGQFLKLMVGNKADFKKVFGLEEEAKITYASESYEEDLEGILAKVGDEYSDVFLAAKNVYDAVELSTILADSDKKSHAKLSSSMIVRFTEHQEDLKKFKRFIRENCPDEYDNLFKNEQKDGYAGYIAHAGKVSQLKFYQYVKKIIQDIAGAEYFLEKIAQENFLRKQRTFDNGVIPHQIHLAELQAIIHRQAAYYPFLKENQEKIEQLVTFRIPYYVGPLSKGDASTFAWLKRQSEEPIRPWNLQETVDLDQSATAFIERMTNFDTYLPSEKVLPKHSLLYEKFMVFNELTKISYTDDRGIKANFSGKEKEKIFDYLFKTRRKVKKKDIIQFYRNEYNTEIVTLSGLEEDQFNASFSTYQDLLKCGLTRAELDHPDNAEKLEDIIKILTIFEDRQRIRTQLSTFKGQFSAEVLKKLERKHYTGWGRLSKKLINGIYDKESGKTILDYLVKDDGVSKHYNRNFMQLINDSQLSFKNAIQKAQSSEHEETLSETVNELAGSPAIKKGIYQSLKIVDELVAIMGYAPKRIVVEMARENQTTSTGKRRSIQRLKIVEKAMAEIGSNLLKEQPTTNEQLRDTRLFLYYMQNGKDMYTGDELSLHRLSHYDIDHIIPQSFMKDDSLDNLVLVGSTENRGKSDDVPSKKVVKKMKAYWEKLYAAGLISQRKFQRLTKGEQGGLTLEDKAHFIQRQLVETRQITKNVAGILDQRYNAKSKEKKVQIITLKASLTSQFRSIFGLYKVREVNDYHHGQDAYLNCVVATTLLKVYPNLAPEFVYGEYPKFQAFKENKATAKTIIYTNLMRFFTEDEPRFTKDSEILWSNSYLKTIKKELNYHQMNIVKKVEVQKGGFSKESIKPKGPSNKLIPVKNGLDPQKYGGFDSPVVAYTVLFTHEKGKKPLIKQEILGITIMEKTRFEQNPILFLEEKGFLRPRVLMKLPKYTLYEFPEGRRRLLASAKEAQKGNQMVLPEHLLTLLYHAKQCLLPNQSESLAYVEQHQPEFQEILERVVDFAEVHTLAKSKVQQIVKLFEANQTADVKEIAASFIQLMQFNAMGAPSTFKFFQKDIERARYTSIKEIFDATIIYQSTTGLYETRRKVVD

SEQ ID NO: 411 - protein, 1150 aa, Enterococcus faecalis
MYSIGLDLGISSVGWSVIDERTGNVIDLGVRLFSAKNSEKNLERRTNRGGRRLIRRKTNRLKDAKKILAAVGFYEDKSLKNSCPYQLRVKGLTEPLSKGEIYKVTLHILKKRGISYLDEDDTEAAKESQDYKEQVRENAQLLTKYTPGQIQLQRLKENNRVKTGINAQGNYQLNVFKVSAYANELATILKTQQAFYPNELTDDWIALFVQPGIAEEAGLIYRKRPYYHGPGNEANNSPYGRWSDFKKTGQPATNIFDKLIGKDFQGELRASGLSLSAQQYNLLNDLTNLKIDGEIPLSPEQKEYILAELMTKEFTRFGVNDVVKLLGVKKERLSGWRLDKKGKPEIHTLKGYRNWRKIFAESGIDLAMLPTETIDCLAKILTLNTEREGIENTLAFELPELAESVKLLVLDRYKELSQSVSTQAWHRFSLKTLHLLIPELMNATSEQNTLLEQFQLKSDVRKRYSEYKKLPTKDVLTEIYNPTVNKTVSQAFKVIDALLVKYGKEQIRYITIEMPRDDNEEDEKKRIKELHAKNSQRKNDSQSYFMQKSGWSQEKFQTTIQKNRRFLAKLLYYYEQDGICAYTGLSISPELLVSDSTEIDHIIPISISLDDSINNKVLVLSKANQVKGQQTPYDAWMDGSFKKINGKFSNWDDYQKWVESRHFSHKKENNLLETRNIFDSEQVEKFLARNLNDTRYASRLVLNTLQSFFANQETKVRVVNGSFTHTLRKKWGADLDKTRETHHHHAVDATLCAVTPFVKVSRYHYAVKEETGEKVMREIDFETGEIVDEMSYREFKKSKKYERKTYQVKWPNFREQLKPVNLHPRIKFSHQVDRKANRKLSDATIYSVREKTEVKTLKSGKQKITTDEYTIGKIKDIYTVDGWEAFKKKQDKLLMKDLDEKTYERLLSIAETTPDFQEVEEKNGKVKRVKRSPFAVYCEENDIPAIRKYAKKNNGPLIRSLKYYDGKLNKHINITKDSQGRPVEKTKNGRKVTLQSLKPYRYDIYQDLETKAYYTVQLYYSDLRFVEGKYGITEKEYMKKVAEQTKGQVVRFCFSLQKNDGLEIEWKDSQRYDVRFYNFQSANSINFKGLEQEMMPAENQFKQKPYNNGAINLNIAKYGKEGKKLRKFNTDILGKKHYLYYEKEPKNIIK

SEQ ID NO: 412 - protein, 1150 aa, Enterococcus faecalis
MYSIGLDLGISSVGWSVIDERTGNVIDLGVRLFSAKNSEKNLERRTNRGGRRLIRRKTNRLKDAKKILAAVGFYEDKSLKNSCPYQLRVKGLTEPLSKGEIYKVTLHILKKRGISYLDEDDTEAAKESQDYKEQVRKNAQLLTKYTPGQIQLQRLKENNRVKTGINAQGNYQLNVFKVSAYANELATILKTQQAFYPNELTDDWIALFVQPGIAEEAGLIYRKRPYYHGPGNEANNSPYGRWSDFKKTGQPATNIFDRLIGKDFQGELRASGLSLSAQQYNLLNDLTNLKIDGEIPLSPEQKEYILAELMTKEFTRFGVNDVAKLLGVKKERLSGWRLDKKGKPEIHTLKGYRNWRKIFAESGIDLATLPTETIDCLAKVLTLNTEHEGIENTLAFELPELAESVKLLVLDRYKELSQSVSTQAWHRFSLKTLHLLIPELMNATSEQNTLLEQFQLKSDVRKRYSEYKKLPTKDVLTEIYNPTVNKTVSQAFKVIDALLVKYGKEQIRYITIEMPRDDNEEDEKKRIKELHAKNSQRKNDSQSYFMQKSGWSQEKFQTTIQKNRRFLAKLLYYYEQDGICAYTGLSISPELLVSDSTEIDHIIPISISLDDSINNKVLVLSKANQVKGQQTPYDAWMDGSFKKINGKFSNWDDYQKWVESRHFSHKKENNLLETRNIFDSEQVEKFLARNLNDTRYASRLVLNTLQSFFANHETKVRVVNGSFTHTLRKKWGADLDKTRETHHHHAVDATLCAVTPFVKVSRYHYAVKEETGEKVMREIDFETGEIVDEMSYQEFKKSKKYERKTYQVKWPNFREQLKPVNLHPRIKFSHQVDRKANRKLSDATIYSVREKTEVKTLKSGKQKITTDEYTIGKIKDIYTVDGWEAFKKKQDKLLMKDLDEKTYERLLSIAETTPDFQEVEEKNGKVKRVKRSPFAVYCEENDIPAIQKYAKKNNGPLIRSLKYYDGKLNKHINITKDSQGRPVEKTKNGRKVTLQSLKPYRYDIYQDLETKAYYTVQLYYSDLRFVEGKYGITEKEYMKKVAEQTKGQVVRFCFSLQKNDGLEIEWKDSQRYDVRFYNFQSANSINFKGLEQEMMPAENQFKQKPYNNGAINLNIAKYGKEGKKLRKFNTDILGKKHYLYYEKEPKNIIK

SEQ ID NO: 413 - protein, 1150 aa, Enterococcus faecalis
MYSIGLDLGISSVGWSVIDERTGNVIDLGVRLFSAKNSEKNLERRTNRGGRRLIRRKTNRLKDAKKILAAVGFYEDKSLKNSCPYQLRVKGLTEPLSKGEIYKVTLHILKKRGISYLDEDDTEAAKESQDYKEQVRKNAQLLTKYTPGQIQLQRLKENNRVKTGINVQGNYQLNVFKVSAYANELATILKTQQAFYPNELTDDWIALFVQPGIAEEAGLIYRKRPYYHGPGNEANNSPYGRWSDFQKTGEPATNIFDKLIGKDFQGELRASGLSLSAQQYNLLNDLTNLKIDGEVPLSSEQKEYILTELMTKEFTRFGVNDVVKLLGVKKERLSGWRLDKKGKPEIHTLKGYRNWRKIFAEAGIDLATLPTETIDCLAKVLTLNTEREGIENTLAFELPELSESVKLLVLDRYKELSQSISTQSWHRFSLKTLHLLIPELMNATSEQNTLLEQFQLKSDVRKRYSEYKKLPTKDVLAEIYNPTVNKTVSQAFKVIDALLVKYGKEQIRYITIEMPRDDNEEDEKKRIKELHAKNSQRKNDSQSYFMQKSGWSQEKFQTTIQKNRRFLAKLLYYYEQDGICAYTGLPISPELLVSDSTEIDHIIPISISLDDSINNKVLVLSKANQVKGQQTPYDAWMDGSFKKINGKFSNWDDYQKWVESRHFSHKKENNLLETRNIFDSEQVEKFLARNLNDTRYASRLVLNTLQSFFTNQETKVRVVNGSFTHTLRKKWGADLDKTRETHHHHAVDATLCAVTPFVKVSRYHYAVKEETGEKVMREIDFETGEIVNEMSYREFKKSKKYERKTYQVKWPNFREQLKPVNLHPRIKFSHQVDRKANRKLSDATIYSVREKTEVKTLKSGKQKITTDEYTIGKIKDIYTLDGWEAFKKKQDKLLMKDLDEKTYERLLSIAETTPDFQEVEEKNGKVKRVKRSPFAVYCEENDIPAIQKYAKKNNGPLIRSLKYYDGKLNKHINITKDSQGRPVEKTKNGRKVTLQSLKPYRYDIYQDLETKAYYTVQLYYSDLRFVEGKYGITEKEYMKKVAEQTKGQVVRFCFSLQKNDGLEIEWKDSQRYDVRFYNFQSANSINFKGLEQEIMPAENQFKQKPYNNGAINLNIAKYGKEGKKLRKFNTDILGKKHYLFYEKEPKNIIK

SEQ ID NO: 414 - protein, 1150 aa, Enterococcus faecalis; identical to SEQ ID NO: 183

SEQ ID NO: 415 - protein, 1150 aa, Enterococcus faecalis; identical to SEQ ID NO: 184

SEQ ID NO: 416 - protein, 1340 aa, Enterococcus faecium
MKKEYTIGLDIGTNSVGWSVLTDDYRLVSKKMKVAGNTEKSSTKKNFWGVRLFDEGQTAEARRSKRTARRRLARRRQRILELQKIFAPEILKIDEHFFARLNESFLVLDEKKQSRHPVFATIKQEKSYHQTYPTIYHLRQALADSSEKADIRLVYLAMAHLLKYRGHFLIEGELNTENSSVTETFRQFLSTYNQQFSEADDKQTEKLDEAVDCSFVFTEKMSKTKKAETLLKYFPHEKSNGYLSQFIKLMVGNQGNFKNVFGLEEEAKLQFSKETYEEDLEELLEKIGDDYIDLFVQAKNVYDAVLLSEILSDSTKNTRAKLSAGMIRRYDAHKEDLVLLKRFVKENLPKKYRAFFGDNSVNGYAGYIEGHATQEDFYKFVKKELTGIRGSEVFLTKIEQENFLRKQRTFDNGVIPHQIHLTELRAIIANQKKHYPFLKEEQEKLESLLTFKIPYYVGPLAKKQENSPFAWLIRKSEEKIKPWNLPEIVDMEGSAVRFIERMNNTDMYIPHNKVLPKNSLLYQKFSIYNELTKVRYQDERGQMNYFSSIEKKEIFHELFEKNRKVTKKDLQEFLYLKYDIKHAELSGIEKAFNASYTTYHDFLTMSENKREMKQWLEDPELASMFEEIIKTLTVFEDREMIKTRLSHHEATLGKHIIKKLTKKHYTGWGRLSKELIQGIRDKQSNKTILDYLINDDDFPHHRNRNFMQLINDDSLSFKKEIKKAQMITDTENLEEIVKELTGSPAIKKGILQSLKIVDEIVGIMGYEPANIVVEMARENQTTGRGLKSSRPRLKALEESLKDFGSQLLKEYPTDNSSLQKDRLYLYYLQNGRDMYTGAPLDIHRLSDYDIDHIIPRSFTTDNSIDNKVLVSSKENRLKKDDVPSEKVVKKMRSFWYDLYSSKLISKRKLDNLTKIKLTEEDKAGFIKRQLVETRQITKHVAGILHHRFNKAEDTNEPIRKVRIITLKSALVSQFRNRFGIYKVREINEYHHAHDAYLNGVVALALLKKYPQLAPEFVYGEYLKFNAHKANKATVKKEFYSNIMKFFESDTPVCDENGEIFWDKSKSIAQVKKVINHHHMNIVKKTEIQKGGFSKETVEPKKDSSKLLPRKNNWDPAKYGGLGSPNVAYTVAFTYEKGKARKRTNALEGITIMEREAFEQSPVLFLKNKGYEQAEIEMKLPKYALFELENGRKRMVASNKEAQKANSFLLPEHLVTLLYHAKQYDEISHKESFDYVNEHHKEFSEVFARVLEFAGKYTLAEKNIEKLEKIYKENQTDDLAKLASSFVNLMQFNAMGAPADFKFFDVTIPRKRYTSLTEIWQSTIIHQSITGLYETRIRMGK

SEQ ID NO: 417 - protein, 1339 aa, Enterococcus faecium
MKKEYTIGLDIGTNSVGWSVLTDDYRLVSKKMKVAGNTEKSSTKKNFWGVRLFDEGQTAEARRSKRTARRRLARRRQRILELQKIFAPEILKIDEHFFARLNESFLVLDEKKQSRHPVFATIKQEKSYHQTYPTIYHLRQALADSSEKADIRLVYLAMAHLLKYRGHFLIEGELNTENSSVTETFRQFLSTYNQQFSEADDKQTEKLDEAVDCSFVFTEKMSKTKKAETLLKYFPHEKSNGYLSQFIKLMVGNQGNFKNVFGLEEAKLQFSKETYEEDLEELLEKIGDDYIDLFVQAKNVYDAVLLSEILSDSTKNTRAKLSAGMIRRYDAHKEDLVLLKRFVKENLPKKYRAFFGDNSVNGYAGYIEGHATQEDFYKFVKKELTGIRGSEVFLTKIEQENFLRKQRTFDNGVIPHQIHLTELRAIIANQKKHYPFLKEEQEKLESLLTFKIPYYVGPLAKKQENSPFAWLIRKSEEKIKPWNLPEIVDMEGSAVRFIERMINTDMYMPHNKVLPKNSLLYQKFSIYNELTKVRYQDERGQMNYFSSIEKKEIFHELFEKNRKVTKKDLQEFLYLKYDIKHAELSGIEKAFNASYTTYHDFLTMSENKREMKQWLEDPELASMFEEIIKTLTVFEDREMIKTRLSHHEATLGKHIIKKLTKKHYTGWGRLSKELIQGIRDKQSNKTILDYLINDDDFPHHRNRNFMQLINDDSLSFKKEIKKAQMITDTENLEEIVKELTGSPAIKKGILQSLKIVDEIVGIMGYEPANIVVEMARENQTTGRGLKSSRPRLKALEESLKDFGSQLLKEYPTDNSSLQKDRLYLYYLQNGRDMYTGAPLDIHRLSDYDIDHIIPRSFTTDNSIDNKVLVSSKENRLKKDDVPSEKVVKKMRSFWYDLYSSKLISKRKLDNLTKIKLTEEDKAGFIKRQLVETRQITKHVAGILHHRFNKAEDTNEPIRKVRIITLKSALVSQFRNRFGIYKVREINEYHHAHDAYLNGVVALALLKKYPQLAPEFVYGEYLKFNAHKANKATVKKEFYSNIMKFFESDTPVCDENGEIFWDKSKSIAQVKKVINHHHMNIVKKTEIQKGGFSKETVEPKKDSSKLLPRKNNWDPAKYGGLGSPNVAYTVAFTYEKGKARKRTNALEGITIMEREAFEQSPVLFLKNKGYEQAEIEMKLPKYALFELENGRKRMVASNKEAQKANSFLLPEHLVTLLYHAKQYDEISHKESFDYVNEHHKEFSEVFARVLEFAGKYTLAEKNIEKLEKIYKENQTDDLAKLASSFVNLMQFNAMGAPADFKFFDVTIPRKRYTSLTEIWQSTIIHQSITGLYETRIRMGK

SEQ ID NO: 418 - protein, 1340 aa, Enterococcus faecium
MKKEYTIGLDIGTNSVGWSVLTDDYRLVSKKMKVAGNTEKSSTKKNFWGVRLFDEGQTAEARRSKRTARRRLARRRQRILELQKIFAPEILKIDEHFFARLNESFLVLDEKKQSRHPVFATIKQEKSYHQTYPTIYHLRQALADSSEKADIRLVYLAMAHLLKYRGHFLIEGELNTENSSVTETFRQFLSTYNQQFSEADDKQTEKLDEAVDCSFVFTEKMSKTKKAETLLKYFPHEKSNGYLSQFIKLMVGNQGNFKNVFGLEEEAKLQFSKETYEEDLEELLEKIGDDYIDLFVQAKNVYDAVLLSEILSDSTKNTRAKLSAGMIRRYDAHKEDLVLLKRFVKENLPKKYRAFFGDNSVNGYAGYIEGHATQEDFYKFVKKELTGIRGSEVFLTKIEQENFLRKQRTFDNGVIPHQIHLTELRAIIANQKKHYPFLKEEQEKLESLLTFKIPYYVGPLAKKQENSPFAWLIRKSEEKIKPWNLPEIVDMEGSAVRFIERMINTDMYIPHNKVLPKNSLLYQKFSIYNELTKVRYQDERGQMNYFSSIEKKEIFHELFEKNRKVTKKDLQEFLYLKYDIKHAELSGIEKAFNASYTTYHDFLTMSENKREMKQWLEDPELASMFEEIIKTLTVFEDREMIKTRLSHHEATLGKHIIKKLTKKHYTGWGRLSKELIQGIRDKQSNKTILDYLINDDDFPHHRNRNFMQLINDDSLSFKKEIKKAQMITDTENLEEIVKELTGSPAIKKGILQSLKIVDEIVGIMGYEPANIVVEMARENQTTGRGLKSSRPRLKALEESLKDFGSQLLKEYPTDNSSLQKDRLYLYYLQNGRDMYTGAPLDIHRLSDYDIDHIIPRSFTTDNSIDNKVLVSSKENRLKKDDVPSEKVVKKMRSFWYDLYSSKLISKRKLDNLTKIKLTEEDKAGFIKRQLVETRQITKHVAGILHHRFNKAEDTNEPIRKVRIITLKSALVSQFRNRFGIYKVREINEYHHAHDAYLNGVVALALLKKYPQLAPEFVYGEYLKFNAHKANKATVKKEFYSNIMKFFESDTPVCDENGEIFWDKSKSIAQVKKVINHHHMNIVKKTEIQKGGFSKETVEPKKDSSKLLPRKNNWDPAKYGGLGSPNVAYTVAFTYEKGKARKRTNALEGITIMEREAFEQSPVLFLKNKGYEQAEIEMKLPKYALFELENGRKRMVASNKEAQKANSFLLPEHLVTLLYHAKQYDEISHKESFDYVNEHHKEFSEVFARVLEFAGKYTLAEKNIEKLEKIYKENQTDDLAKLASSFVNLMQFNAMGAPADFKFFDVTIPRKRYTSLTEIWQSTIIHQSITGLYETRIRMGK

SEQ ID NO: 419 - protein, 1340 aa, Enterococcus faecium
MKKEYTIGLDIGTNSVGWSVLTDDYRLVSKKMKVAGNTEKSSTKKNFWGVRLFDEGQTAEARRSKRTARRRLARRRQRILELQKIFAPEILKIDEHFFARLNESFLVLDEKKQSRHPVFATIKQEKSYHQTYPTIYHLRQALADSSEKADIRLVYLAMAHLLKYRGHFLIEGELNTENSSVTETFRQFLSTYNQQFSEADDKQTEKLDEAVDCSFVFTEKMSKTKKAETLLKYFPHEKSNGYLSQFIKLMVGNQGNFKNVFGLEEEAKLQFSKETYEEDLEELLEKIGDDYIDLFVQAKNVYDAVLLSEILSDSTKNTRAKLSAGMIRRYDAHKEDLVLLKRFVKENLPKKYRAFFGDNSVNGYAGYIEGHATQEDFYKFVKKELTGIRGSEVFLTKIEQENFLRKQRTFDNGVIPHQIHLTELRAIIANQKKHYPFLKEEQEKLESLLTFKIPYYVGPLAKKQENSPFAWLIRKSEEKIKPWNLPEIVDMEGSAVRFIERMINTDMYMPHNKVLPKNSLLYQKFSIYNELTKVRYQDERGQMNYFSSIEKKEIFHELFEKNRKVTKKDLQEFLYLKYDIKHAELSGIEKAFNASYTTYHDFLTMSENKREMKQWLEDPELASMFEEIIKTLTVFEDREMIKTRLSHHEATLGKHIIKKLTKKHYTGWGRLSKELIQGIRDKQSNKTILDYLINDDDFPHHRNRNFMQLINDDSLSFKKEIKKAQMITDTENLEEIVKELTGSPAIKKGILQSLKIVDEIVGIMGYEPANIVVEMARENQTTGRGLKSSRPRLKALEESLKDFGSQLLKEYPTDNSSLQKDRLYLYYLQNGRDMYTGAPLDIHRLSDYDIDHIIPRSFTTDNSIDNKVLVSSKENRLKKDDVPSEKVVKKMRSFWYDLYSSKLISKRKLDNLTKIKLTEEDKAGFIKRQLVETRQITKHVAGILHHRFNKAEDTNEPIRKVRIITLKSALVSQFRNRFGIYKVREINEYHHAHDAYLNGVVALALLKKYPQLAPEFVYGEYLKFNAHKANKATVKKEFYSNIMKFFESDTPVCDENGEIFWDKSKSIAQVKKVINHHHMNIVKKTEIQKGGFSKETVEPKKDSSKLLPRKNNWDPAKYGGLGSPNVAYTVAFTYEKGKARKRTNALEGITIMEREAFEQSPVLFLKNKGYEQAEIEMKLPKYALFELENGRKRMVASNKEAQKANSFLLPEHLVTLLYHAKQYDEISHKESFDYVNEHHKEFSEVFARVLEFAGKYTLAEKNIEKLEKIYKENQTDDLAKLASSFVNLMQFNAMGAPADFKFFDVTIPRKRYTSLTEIWQSTIIHQSITGLYETRIRMGK

SEQ ID NO: 420 - protein, 1339 aa, Enterococcus faecium
MKKEYTIGLDIGTNSVGWSVLTDDYRLVSKKMKVAGNTEKSSTKKNFWGVRLFDEGQTAEARRSKRTARRRLARRRQRILELQKIFAPEILKIDEHFFARLNESFLVLDEKKQSRHPVFATIKQEKSYHQTYPTIYHLRQALADSSEKADIRLVYLAMAHLLKYRGHFLIEGELNTENSSVTETFRQFLSTYNQQFSEADDKQTEKLDEAVDCSFVFTEKMSKTKKAETLLKYFPHEKSNGYLSQFIKLMVGNQGNFKNVFGLEEAKLQFSKETYEEDLEELLEKIGDDYIDLFVQAKNVYDAVLLSEILSDSTKNTRAKLSAGMIRRYDAHKEDLVLLKRFVKENLPKKYRAFFGDNSVNGYAGYIEGHATQEDFYKFVKKELTGIRGSEVFLTKIEQENFLRKQRTFDNGVIPHQIHLTELRAIIANQKKHYPFLKEEQEKLESLLTFKIPYYVGPLAKKQENSPFAWLIRKSEEKIKPWNLPEIVDMEGSAVRFIERMINTDMYIPHNKVLPKNSLLYQKFSIYNELTKVRYQDERGQMNYFSSIEKKEIFHELFEKNRKVTKKDLQEFLYLKYDIKHAELSGIEKAFNASYTTYHDFLTMSENKREMKQWLEDPELASMFEEIIKTLTVFEDREMIKTRLSHHEATLGKHIIKKLTKKHYTGWGRLSKELIQGIRDKQSNKTILDYLINDDDFPHHRNRNFMQLINDDSLSFKKEIKKAQMITDTENLEEIVKELTGSPAIKKGILQSLKIVDEIVGIMGYEPANIVVEMARENQTTGRGLKSSRPRLKALEESLKDFGSQLLKEYPTDNSSLQKDRLYLYYLQNGRDMYTGAPLDIHRLSDYDIDHIIPRSFTTDNSIDNKVLVSSKENRLKKDDVPSEKVVKKMRSFWYDLYSSKLISKRKLDNLTKIKLTEEDKAGFIKRQLVETRQITKHVAGILHHRFNKAEDTNEPIRKVRIITLKSALVSQFRNRFGIYKVREINEYHHAHDAYLNGVVALALLKKYPQLAPEFVYGEYLKFNAHKANKATVKKEFYSNIMKFFESDTPVCDENGEIFWDKSKSIAQVKKVINHHHMNIVKKTEIQKGGFSEETVEPKKDSSKLLPRKNNWDPAKYGGLGSPNVAYTVAFTYEKGKARKRTNALEGITIMEREAFEQSPVLFLKNKGYEQAEIEMKLPKYALFELENGRKRMVASNKEAQKANSFLLPEHLVTLLYHAKQYDEISHKESFDYVNEHHKEFSEVFARVLEFAGKYTLAEKNIEKLEKIYKENQTDDLAKLASSFVNLMQFNAMGAPADFKFFDVTIPRKRYTSLTEIWQSTIIHQSITGLYETRIRMGK

SEQ ID NO: 421 - protein, 1340 aa, Enterococcus faecium
MKKEYTIGLDIGTNSVGWSVLTDDYRLVSKKMKVAGNTEKSSTKKNFWGVRLFDEGQTAEARRSKRTARRRLARRRQRILELQKIFAPEILKIDEHFFARLNESFLVLDEKKQSRHPVFATIKQEKSYHQTYPTIYHLRQALADSSEKADIRLVYLAMAHLLKYRGHFLIEGELNTENSSVTETFRQFLSTYNQQFSEADDKQTEKLDEAVDCSFVFTEKMSKTKKAETLLKYFPHEKSNGYLSQFIKLMVGNQGNFKNVFGLEEEAKLQFSKETYEEDLEELLEKIGDDYIDLFVQAKNVYDAVLLSEILSDSTKNTRAKLSAGMIRRYDAHKEDLVLLKRFVKENLPKKYRAFFGDNSVNGYAGYIEGHATQEDFYKFVKKELTGIRGSEVFLTKIEQENFLRKQRTFDNGVIPHQIHLTELRAIIANQKKHYPFLKEEQEKLESLLTFKIPYYVGPLAKKQENSPFAWLIRKSEEKIKPWNLPEIVDMEGSAVRFIERMINTDMYIPHNKVLPKNSLLYQKFSIYNELTKVRYQDERGQMNYFSSIEKKEIFHELFEKNRKVTKKDLQEFLYLKYDIKHAELSGIEKAFNASYTTYHDFLTMSENKREMKQWLEDPELASMFEEIIKTLTVFEDREMIKTRLSHHEATLGKHIIKKLTKKHYTGWGRLSKELIQGIRDKQSNKTILDYLINDDDFPHHRNRNCMQLINDDSLSFKKEIKKAQMITDTENLEEIVKELTGSPAIKKGILQSLKIVDEIVGIMGYEPANIVVEMARENQTTGRGLKSSRPRLKALEESLKDFGSQLLKEYPTDNSSLQKDRLYLYYLQNGRDMYTGAPLDIHRLSDYDIDHIIPRSFTTDNSIDNKVLVSSKENRLKKDDVPSEKVVKKMRSFWYDLYSSKLISKRKLDNLTKIKLTEEDKAGFIKRQLVETRQITKHVAGILHHRFNKAEDTNEPIRKVRIITLKSALVSQFRNRFGIYKVREINEYHHAHDAYLNGVVALALLKKYPQLAPEFVYGEYLKFNAHKANKATVKKEFYSNIMKFFESDTPVCDENGEIFWDKSKSIAQVKKVINHHHMNIVKKTEIQKGGFSKETVEPKKDSSKLLPRKNNWDPTKYGGLGSPNVAYTVAFTYEKGKARKRTNALEGITIMEREAFEQSPVLFLKNKGYEQAEIEMKLPKYALFELENGRKRMVASNKEAQKANSFLLPEHLVTLLYHAKQYDEISHKESFDYVNEHHKEFSEVFARVLEFAGKYTLAEKNIEKLEKIYKENQTDDLAKLASSFVNLMQFNAMGAPADFKFFDVTIPRKRYTSLTEIWQSTIIHQSITGLYETRIRMGK

SEQ ID NO: 422 - protein, 892 aa, Enterococcus faecium
MTFKIPYYVGPLAKKQENSPFAWLIRKSEEKIKPWNLPEIVDMEGSAVRFIERMINTDMYMPHNKVLPKNSLLYQKFSIYNELTKVRYQDERGQMNYFSSIEKKEIFHELFEKNRKVTKKDLQEFLYLKYDIKHAELSGIEKAFNASYTTYHDFLTMSENKREMEQWLEDPELASMFEEIIKTLTVFEDREMIKTRLSHHKATLGKHIIKKLTKKHYTGWGRLSKELIQGIRDKQSNKTILDYLINDDDFPHHRNRNFMQLINDDSLSFKKEIKKAQMITDTENLEEIVKELTGSPAIKKGILQSLKIVDEIVGIMGYEPANIVVEMARENQTTGRGLKSSRPRLKALEESLKDFGSQLLKEYPTDNSSLQKDRLYLYYLQNGRDMYTGAPLDIHRLSDYDIDHIIPRSFTTDNSIDNKVLVSSKENRLKKDDVPSEKVVKKMRSFWYDLYSSKLISKRKLDNLTKIKLTEEDKAGFIKRQLVETRQITKHVAGILHHRFNKAEDTNEPIRKVRIITLKSALVSQFRNRFGIYKVREINEYHHAHDAYLNGVIALALLKKYPQLAPEFVYGEYLKFNAHKANKATVKKEFYSNIMKFFESDTPVCDENGEIFWDKSKSIAQVKKVINHHHMNIVKKTEIQKGGFSKETVEPKKDSSKLLPRKNNWDPAKYGGLGSPNVAYTVAFTYEKGKARKRTNALEGITIMEREAFEQSPVLFLKNKGYEQAEIEMKLPKYALFELENGRKRMVASNKEAQKANSFLLPEHLVTLLYHAKQYDEISHKESFDYVNEHHKEFSEVFARVLEFAGKYTLAEKNIEKLEKIYKENQTDDLAKLASSFVNLMQFNAMGAPADFKFFDVTIPRKRYTSLTEIWQSTIIHQSITGLYETRIRMGK

SEQ ID NO: 423 - protein, 1336 aa, Enterococcus hirae
MTKDYTIGLDIGTNSVGWAVLTDDYQLMKRKMSVHGNTEKKKIKKNFWGARLFDEGQTAEFRRTKRTNRRRLARRKYRLSKLQDLFAEELCKQDDCFFVRLEESFLVPEEKQYKPASIFPTLEEEKEYYQKYPTIYHLRQKLVDSTEKEDLRLVYLALAHLLKYRGHFLFEGDLDTENTSIEESFRVFLEQYSKQSDQPLIVHQPVLTILTDKLSKTKKVEEILKYYPTEKINSFFAQCLKLIVGNQANFKRIFDLEAEVKLQFSKETYEEDLESLLEKIGDEYLDIFLQAKKVHDAILLSEIISSTVKHTKAKLSSGMVERYERHKADLAKFKQFVKENVPQKATVFFKDTTKNGYAGYIKGKTTQEEFYKFVKKELSGVVGSEPFLEKIDQETFLLKQRTYTNGVIPHQVHLIELKAIIDQQKQHYPFLEEAGPKIIALFKFRIPYYVGPLAKEQEASSFAWIERKTAEKINPWNFSEVVDIEKSAMRFIQRMTKQDTYLPTEKVLPKNSLLYQKYMIFNELTKVSYKDERGVKQYFSGDEKQQIFKQLFQKERGKITVKKLQNFLYTHYHIENAQIFGIEKAFNASYSTYHDFMKLAKTNQKAMQEWLEQPEMEPIFEDIVKILTIFEDRQMIKHQLSKYQEVFGEKLLKEFARKHYTGWGRFSAKLIHGIRDRKTNKTILDYLINDDDVPANRNRNLMQLINDEHLSFKEEIAKATVFSKHKSLVDVIQDLPGSPAIKKGIWQSLKIVEELIAIIGYKPKNIVIEMARENQKTHRTSPRLKALENGLKQIGSTLLKEQPTDNKALQKERLYLYYLQNGRDMYTGEPLEIENLHQYEVDHIIPRSFIVDNSIDNKVLVASKQNQKKRDDVPKKQIVNEQRIFWNQLKEAKLISPKKYAYLTKIELTPEDKARFIQRQLVETRQITKHVANILHQSFNQEEEGTDCDGVQIITLKATLTSQFRQTFGLYKVREINPHHHAHDAYLNGFIANVLLKRYPKLAPEFVYGKYVKYSLARENKATAKKEFYSNILKFLESDEPFCDENGEIYWEKSHHLPRIKKVLSSHQVNVVKKVEQQKGGFYKETVNSKEKPDKLIERKNNWDVTKYGGFGSPVIAYAIAFVYAKGKTQKKTRAIEGITIMEQAAFEKDPTTFLKEKGFPQVTEFIKLPKYTLFEFDNGRRRFLASHKESQKGNPFILSDQLVTLLYHAQHYDKITYQESFDYVNTHLSDFSAILTEVLAFAEKYTLADKNIERIQELYEENKYGETSMIAQSFLQLLQFNAIGAPADFKFFGVTIPRKRYTSLTEIWDATIIYQSVTGLYETRIRMGDLWAGEQ

SEQ ID NO: 424 - protein, 116 aa, Enterococcus sp.
MYSIGLDLGISSVGWSVIDERTGNVIDLGVRLFSAKNSEKNLERRTNRGGRRLIRRKTNRLKDAKKILAAVGFYEDKSLKNSCPYQLRVKGLTELLSKGEIYKVTLHILKNVELVT

SEQ ID NO: 425 - protein, 1391 aa, Eubacterium sp.
MENKQYYIGLDVGTNSVGWAVTDTSYNLLRAKGKDMWGARLFDEAKTAVERRTKRTSRRRSEREKARKAMLKELFADEINKVDPNFFIRLEESKFFLDDRSENNRQRYTLFNDAKFTDKDYYEKYKTIFHLRSALINSDEKFDVRLVFLAILNLFSHRGHFLNASLKGDGEIQGVDIFYNDLYEVCEEFEIDLPQISNIDNFEKILSQKGKSRTKILEELSEELSISKKEKIKYSLLKLICGMKIKVVDIYADEDIQEDDKKKDLGFRESDYEKSSLEVKEIIGDDHFELIERAKAVHDIGLLANIIGNSKYLCEARVEAYDNHHKDLQKIKELLKKYDIKAYTDMFRKMTDKNYSAYVGSVNSNIAKERRSVDNRKIEDLYEYIKKIALKNISDDNEDKIEILKKIETGEFLKKQLTASNGVIPNQLQSRELRAILKKAENYLPFLKEKGEKNLTVSEMIIQLFEFQIPYYVGPLDKNPKKDKNANSWAVIPSGGRILPWNFEDKVDVKGSRKEFIEKMVRKCTYLSEEHTLPKQSLLYEKFMVLNEINNIKIDGEKISVEAKQKIYNDLFMKGKKVSQKAIKQELISLNIMSKDSVLSGIDTVCNAYLSSIAKFRGVFDENVNNQSTIDMIEDIIFLKTVYSDEKRFVKEEIVEKYGDEIDKDKIKRILGFKFSNWGNISKSFLELEGADVGTGEIRSIIQSLWETNFNLMELLSSRFTYMDELEKRVKKLEKPLSEWTIEDLDDMYLSSPVKRMIWQSMKIVDEIQTVIGYAPKRIFVEMTRSEGEKVRTKSRKDRLKELYSAIKEDSKQWVKELDAKDESYFRSKKMYLYYLQKGRCMYSGEVIELDKLMDDNLYDIDHIYPRSFVKDDSLDNLVLVKKEINNRKQNDPITPQIQASCQGFWKVLHEQGFISNEKYSRLTRKTQEFSDEEKLSFINRQIVETGQATKCMAQILQKSMGEDVDVVFSKARLVSEFRHKFELFKSRLINDFHHANDAYLNIVVGNSYFVKFTRNPANFIKDARKNPDNPAYKYHMDRFFERDVKSKSEVAWIGQSEGNAGTIAIVKKTMSKNSPLITKKVEEGHGSITKETIVGVKEIKFGRNKVEKADKTPKKANLQAYRPIKTSDERLCNILRYGGRTSISISGYCLVEYVKKRKTIRSLEAIPVYLGRKDSLSEEKLLNYFRYNLNDGGKDSVSDIRLCLPFISTNSLVKIDGYLYYLGGKNDDRIQLYNAYQLKMKKEEVEYIRKIEKAVSMSKFDEIDREKNPVLTEEKNIELYNKIQDKFENTVFSKRMSLVKYNKKDLSFGDFLKNKKSKFEEIDLEKQCKVLYNIIFNLSNLKEVDLSDIGGSKSTGKCRCKKNITNYKEFKLIQQSITGLYSCEKDLMTI

SEQ ID NO: 426 - protein, 1391 aa, Eubacterium yurii
MENKQYYIGLDVGTNSVGWAVTDTSYNLLRAKGKDMWGARLFEKANTAAERRTKRTSRRRSEREKARKAMLKELFADEINRVDPSFFIRLEESKFFLDDRSENNRQRYTLFNDATFTDKDYYEKYKTIFHLRSALINSDEKFDVRLVFLAILNLFSHRGHFLNASLKGDGDIQGMDVFYNDLVESCEYFEIELPRITNIDNFEKILSQKGKSRTKILEELSEELSISKKDKSKYNLIKLISGLEASVVELYNIEDIQDENKKIKIGFRESDYEESSLKVKEIIGDEYFDLVERAKSVHDMGLLSNIIGNSKYLCEARVEAYENHHKDLLKIKELLKKYDKKAYNDMFRKMTDKNYSAYVGSVNSNIAKERRSVDKRKIEDLYKYIEDTALKNIPDDNKDKIEILEKIKLGEFLKKQLTASNGVIPNQLQSRELRAILKKAENYLPFLKEKGEKNLTVSEMIIQLFEFQIPYYVGPLDKNPKKDNKANSWAKIKQGGRILPWNFEDKVDVKGSRKEFIEKMVRKCTYISDEHTLPKQSLLYEKFMVLNEINNIKIDGEKISVEAKQKIYNDLFVKGKKVSQKDIKKELISLNIMDKDSVLSGTDTVCNAYLSSIGKFTGVFKEEINKQSIVDMIEDIIFLKTVYGDEKRFVKEEIVEKYGDEIDKDKIKRILGFKFSNWGNLSKSFLELEGADVGTGEVRSIIQSLWETNFNLMELLSSRFTYMDELEKRVKKLEKPLSEWTIEDLDDMYLSSPVKRMIWQSMKIVDEIQTVIGYAPKRIFVEMTRSEGEKVRTKSRKDRLKELYNGIKEDSKQWVKELDSKDESYFRSKKMYLYYLQKGRCMYSGEVIELDKLMDDNLYDIDHIYPRSFVKDDSLDNLVLVKKEINNRKQNDPITPQIQASCQGFWKILHDQGFMSNEKYSRLTRKTQEFSDEEKLSFINRQIVETGQATKCMAQILQKSMGEDVDVVFSKARLVSEFRHKFELFKSRLINDFHHANDAYLNIVVGNSYFVKFTRNPANFIKDARKNPDNPVYKYHMDRFFERDVKSKSEVAWIGQSEGNSGTIVIVKKTMAKNSPLITKKVEEGHGSITKETIVGVKEIKFGRNKVEKADKTPKKPNLQAYRPIKTSDERLCNILRYGGRTSISISGYCLVEYVKKRKTIRSLEAIPVYLGRKDSLSEEKLLNYFRYNLNDGGKDSVSDIRLCLPFISTNSLVKIDGYLYYLGGKNDDRIQLYNAYQLKMKKEEVEYIRKIEKAVSMSKFDEIDREKNPVLTEEKNIELYNKIQDKFENTVFSKRMSLVKYNKKDLSFGDFLKNKKSKFEEIDLEKQCKVLYNIIFNLSNLKEVDLSDIGGSKSTGKCRCKKNITNYKEFKLIQQSITGLYSCEKDLMTI

SEQ ID NO: 427 - protein, 1142 aa, Facklamia hominis
MYSVGLDIGIASCGYSIINDVNGNIVELGTLLFKSRNSDNNEERRTNRGSRRLINRRRTRLDDGKKLLAEKGFKQDSKLKHVCPYELRVKGLHEKLTQGEIYKVVLHILKKRGISYLDESDENSSGIDGASYKDQVNLNLNLQKELTPGQIQLKRLKENGRIKSGVTFENGYQLNVFSVSAYANELNKILTKQSEYYSEIDQIWIDRFTKNGYRKEAGLVYRKRPYYDGPGNEKNNSIYGRWANFKEDGHPKENIFDQLIGLDSVDSTQVRASASTLTAQKYNLLNDLNNLTIIEDDRKFTTDEKVSIINYLMTQDITRFGPKELAKFYQLEVDQIRGWRIDNKGNPEIHSLKVYRDWKKIFNTSSIDLTSIQTWVVDELANVITLNTEIPSTLATLKIKIPDIDQQILNFVENNFYELKKKTSKNSWHSFSLKTLNILIPELLNTSEEQNTILERLNLKFDLKNKYAEKNQIPVKELLEQIYNPTVTKSVHQSIKLFNEIIEKYGKNNISYVTIEMPRDKNDQDQKDTIKRINKLNSERKNDSEKYFLERSGWDTIRFESALKKPRFAEKLLFYYEQKGKCAYSGQDILAESLLNESCEVDHIIPLSISFDDSIHNKVLVTASSNQEKGQRTPYMAFIDGAKLGQSWDDFVAWVNSCGFHRKKVQNLLYEENIFNPDVQRGFVSRNLNDTRYASRIVLNAIQSFFYKQKDLTKVKVVNGSFTHTLRKKWGSSLDKNRDTYHHHAVDATLCAVTPFINIVKYEFFEEDGIKYMVDLTTGEKVAYSDYKKMKFYDKRAYVPIWDGFIKQLTPANLYPKIKFSHQVDSKWNRKISDATIYSTRKIVETKINKKGVAKETVKDIVIDKIKDIYTPEGWRKFKEKQDKLLMKNFDEKTYNKLIKIAKEYPEKKEVQTSNGKVSLVEVSPFKMYCEEQNVPAIRKYSKKGNGPYIRSLKFYDKELGKHINITKDSYGNDIERTIRNKKIILKNQNSWRTDVYYNSVNNCYELLGIKYCHLKFYRGKYGIPKSIYDELKKEDEISSESVFKFSLYRHDRVRFEKDGEYIEALFGSKNESNKNYLELSPIDKNKWLSKENVKFFGEVAASGRFIKGLKPGIKVIKQSTDYMGHVYAIHQEKLKFVLSDA

SEQ ID NO: 428 - protein, 1347 aa, Finegoldia magna
MKSEKKYYIGLDVGTNSVGWAVTDEFYNILRAKGKDLWGVRLFEKAKTAADTRTFRSGRRRNDRKGMRLQILREIFEDEIKKVDKDFYDRLDESKFWAEDKKVSGKYSLFNDKNFSDKQYFEKFPTIFHLRKYLMEEHGKVDIRYYFLAINQMMKRRGHFLIDGQISHVTDDKPLKEQLILLINDLLKIELEEELMDSIFEILADVNEKRTDKKNNLKELIKGQDFNKQEGNILNSIFESIVTGKAKIKNIISDEDILEKIKEDNKEDFVLTGDSYEENLQYFEEVLQENITLFNTLKSTYDFVILQSILKGKSTLSDAQVERYDEHKKDLEILKKVIKKYDEDGKLFKQVFKEDNGNGYVSYIGYYLNKNKKITAKKKISNIEFTKYVKGILEKQCDCEDEAVKYLLGKIEQENFLLKQISSINSVIPHQIHLFELDKILENLAKNYPSFNNKKEEFTKIEKIRKTFTFRIPYYVGPLNDYHKNNGGNAWIFRNKGEKIRPWNFEKIVDLHKSEEEFIKRMLNQCTYLPEETVLPKSSILYSEYMVLNELNNLRIKGKPLDTDVKLKLIEELFKKKTKVTLKSIRDYMIRNNFADKEDFDNSEKNLEIVSNMKSYIDFNNILGDKFELEMVEDLIEKITIHTGNKTLLKKYIEETYPDLSSSQIQKIINLKYKDWGRLSRKLLDGIKGRNKTDDVNTVINFMRNSSDNLMQIIEGKNYSFNEYIDNLRKKYIPQEISYEVVENLYVSPSVKKMIWQVIRVTEEITKVMGYDPDKIFIEMAKSEEEKKTTISRKNKLLDLYKAIKKDERDSQYEKLLTGLNKLDESELRSKKLYLYYTQMGRDMYTGEKIDLDKLFDSTHYDKDHIIPQSMKKDDSIINNLVLVNKNANQTTKGNIYPVPSSIRNNPDIYNYWKYLMEKEFISKEKYNRLIRNTPLTNEELGVFINRQLVETRQSTKAIKELFEKFYQKSKIIPVKASLASDLRKDMNTLKSREVNDLHHAHDAFLNIVAGDVWNREFTSNPINYVNENREGDKVKYSLSKYFTRPRKSKGKVIWTPEKGRKLIVDTLNKPSVLISNESHVKKGELFNATISGKKDYKKGKIYLPLKKDDRLKDVSKYGGYKAINGAFFFLVEHTKSKKRIRSIELFPLHLLSKFYEDKNTVLDYAINVLQLQDPKIIIDKINYRTEIIIDNFSYLISTKSNDGSITVKPNEQMYWRVDEISNLKKIENKYKKDAILTEEDRKIMESYIDKIYQQFKAGKYKNRRTTDTIIEKYEIIDLDTLDNKQLYQLLVAFISLSYKTSNNAVDFTVIGLGTECGKPRITNLPDNTYLVYKSITGIYEKRIRIK

SEQ ID NO: 429 - protein, 1348 aa, Finegoldia magna; identical to SEQ ID NO: 227

SEQ ID NO: 430 - protein, 1516 aa, unidentified
  source 1..1516: note = Flavobacteriaceae
MLKQQKDKIIGMNKKILGLDLGTNSIGWALVKQDLENKYGEIIGCGSRIIPMSQDVLGKFDAGISISQTAERTNYRSVRKLIQRNTLRRERLHRVLHQLDFLPKHYNDSIDFEKKLGQFKTDKETKLNYFVNQHGKHEFLFKDSFNEMVKEFKEEQPELFYIKNNGKETKIPYDWTIYYLRKKALSKKISKEELSWLVLNFNQKRGYYQLRGEIDEEKEKNKRYEKLYVSEVVKTNNTIKKTGEYLYDIYFDNGWKYEKQTTKPQDWLHKHKEFIITTTTLKNGETKRTFKTVDSEKDWIAIKSKTEQDIKESNKTVGAFIYDTLLKNPTQKIRGSLVKTIERKFYREEFEKILKEQIKHRPEINVNTAIGKENYTKCVTELYPRNEAHANNILTNDFNYLFTKDILFYQRPLKSKKSEIANCQYEYRTYIKKKEKTGKEERVKQPLKATPKSHPLFQEFRLWQFIHNLKIYIRETTVGNKPLFDVDITDTFFTSENDWATLFEYLNNKKEIEQKHVLEYLVSKKIISKSEKTDYRWNYVEDKKYPGNETRVDFINRLKKVENLNVDEFLTSELEFKLWHIIYSVTDKNEYEKALENFAIRQNIDKDSFVNSFKKFPPFKSDYGAYSTKAIKKLLPLMRLGKFWDGSEIPKVVVEKITDIKTRLTSVNYDESLFKKDEKKILETIVDDITPKQLLKSFVKLKGKNHLAGLNTYQACYLVYERHSESSDITQWENPDDIDSFLNHFKQHSLRNPIVEQVVTETLRTVRDIWKYYGNGSPNYFNEIHIELGREMKNPADKRKQMSAKINENENTNQRIKGILQELMNDGVQDIKPYSPSQQEILKIYEEGISQNPNVDYSKVSEDEITKIKKSNNPTLKEIQRYKLWLEQKYISPYTGKPIPLSELFTPAYQIEHIIPQSRYFDNSLSNKIICESEVNEDKSNKTAYEYLKTNGGSIVHGHHLLSLKEYEDHCQHYFKKNRTKLKNLLSEEIPEGFINRQLNDSRYISKLIKGLLSNIVREENEQEATSKNIVPVTGSITSKLKQDWGLNDKWNEIIAPRFKRLNKMTNSNDFGYFDEKINTFRIQVPDAISRGFNKKRIDHRHHTLDALVIACCTKKHIQYLNSLNNEIIKHELKPSILIKNAQGDYTKHFMLPWNNFPIDCKNAIENTIVSFKQNLRVINKTSNKYQSYKDENGNLRLGKDGKPKKGLTKQTKGNNWAVRKAMHEDTFYGEIVDGENKGKLKIKTLLDTSFDVKKIEDKVLDKSIRTILINYLKQDKYKNLSKPHEEAFSPNGIIEMNKNIISLNNNIPHKPIKRVTLKHEKGKKFSIKTLLDKKTKFAKSATGTNVFFCIYKNINGKIKYHTPSFEEIIEIQKQEFEIKYKSKLNVPETLFDKKESFELLFYLQPNDLVYLPNDEELKNRQLIDFNNLNKKQIKRIYKFTDGSGTTANFIPYQVAKVIFNLNKKEQAKSSFKYPIQNEFGVGSPQSKNQKSIEGILIKERCIKLKIDRLGNISKA

SEQ ID NO: 431 - protein, 1629 aa, Francisella sp.
MNFKILPIAIDLGVKNTGVFSAFYQKGTSLERLDNKNGKVYELSKDSYTLLMNNRTARRHQRRGIDRKQLVKRLFKLIWTEQLNLEWDKDTQQAISFLFNRRGFSFITDGYSPEYLNIVPEQVKAILMDIFDDYNGEDDLDSYLKLATEQESKISEIYNKLMQKILEFKLRKLCTDIKDDKVSTKTLKEITSYEFELLADYLANYSEILKTQKFSYTDKQGNLKELSYYHHDKYNIQEFLKRHATINIQILDTLLTDDLDIWNFNFEKFDFDKNEEKLQNQEDKDHIQAHLHHFVFAVNKIKSEMASGGRHRSQYFQEITNVLDENNHQEGYLKNFCENLHNKKYSNLSVKNLVNLIGNLSNLELKPLRKYFNDKIHAKADHWDEQKFTETYCHWILGEWRVGVKDQDKKDGAKYSYKDLCNELKQKVTKAGLVDFLLELDPCRTIPPYLDNNNRKPPKCQSLILNPKFLDNQYPNWQQYLQELKKLQSIQNYLESFETDLKVLKSSKDQPYFVEYRSSNQQIASGQRDYKDLDARILQFIFDRVKASDELLLNEIYFQAKKLKQKASSELEKLESSKKLDEVIANSQLSQILKSQHTNGIFEQGTFLHLVCKYYKQRQRARDSRLYIMPEYRYDKKLHKYNNTGRFDDDNQLLTYCNHKPRQKRYQLLNDLAGVLQVSPNFLKDKIGSDDDLFISKWLVEHIRGFKKACEDSLKIQKDNRGLLNHKINIARNTKGKCEKEIFNLICKIEGSEDKKGNYKHGLAYELGVLLFGEPNEASKPEFDRKIKKFNSIYSFAQIQQIAFAERKGNANTCAVCSADNAHRMQQIKITEPVEDNKDKIILSAKAQRLPAITTRIVDGAVKKMATILAKNIVDDNWQNIKQVLSAKHQLHIPIITESNAFEFEPALADVKGKSLKDRRKKALERISPENIFKDKNNRIKEFAKGISAYSGANLTDGDFDGAKEELDHIIPRSHKKYGTLNDEANLICVTRGDNKNKGNRIFCLRDLANNYKLKQFETTDDLEIEKKIADTIWDANKKDFKFGNYRSFINLTPQEQKAFRHALFLADENPIKQAVIRAINNRNRTFVNGTQRYFAEVLANNIYLRAKKENLNTDKISFDYFGIPTIGNGRGIAEIRQLYEKVDSDIQAYAKGDKPQASYSHLIDAMLAFCIAADEHRNDGSIGLEIDKNYSLYPLDKNTGEVFTKDIFSQIKITDNEFSDKKLVRKKATEGFNTHRQMTRDGIYAENYLPILIHKELDEVRKGYTWKNSEEIKIFKGKKYDIQQLNNLLYCLKFVDKPISIDIQISTLEELRNILTTNNIAATAEYYYINLKTQKLHEYYIENYNTALGYKKYTKEMEFLRSLAYRSERVKIKSIDDVKQVLDKDSNFIIGKITLPFKKEWQRLYREWQNITIKDDYEFLKSFFNVKSITKLHKKVRKDFSLPISTNEGKFLVKRKTWDNNFIYQILNDSDSRVDGTKPFIPAFDISKNEIVEAIIDSFTSKNIFWLPKNIELQKVDNKNIFAIDTSKWFEVETPSDLRDIGVATIQYKIDNNSRPKVRVKLDYVIDDDSKINYFTNHSLLKSRYPDKVLEILKQSTIIEFESSGFNKTIKEMLGMTLAGIYNETSNN

SEQ ID NO: 432 - protein, 1646 aa, Francisella sp.
MNIKILPIAIDLGAKNTGVFSAFYQKGTSLESLDNKNGKVYELSKDSYTLLMNNRTARRHQRRGIDRKQLVKRLFKLIWTKQLNLEWNKDTQQTISFLLNRRGFSFITDGYSPEYLNIAPEAVKAILMSILDDYNGEDDLDSYLQSATENDSKIDELYNKLLQKALEFKLRKLCIDIKEDKVTTKTLKELSNTEFKLLANYLVDYDRILRTQKFSYTDKQGNLRELNYYHHDKYNIQEFLKRNIIINDVILEKLTDDLDIWNLNFDKFDFEKNLEKLENQEDKDYLQTHLHHFVFAVNKIKSEMASGGRHRSQYFQEITNVLVENNHQEGYLKNFCENLHNKKYSNLSVKNLVNLIGNLSNLELKPLRKYFNDKIHAKADYWDEQKFAETYSDWILGEWRVGAKDKDKKDGAKYSYKNLCDELKQKVGINQDGIINQTKSDFVDFLLELDPCRTIPPYLDNNNRKPPKCQSLILNPKFLDNKYPNWQQYLQELKKLQTVQNYLGNFEIDLKDLKSSKEQPYFVKYKSLNQQIASGQRDYKDLDARVLQFIFDRVKASDELLLNEIYSHAKKLKQNTSSELEKLELCKKLDEVIANSQLSQILKSQHVNGIFEQGTFLHLVCKYYKQRQRARDSRLYIMPEYRYDKKLDKYNNTGRFDDDNQLLTYCNHKPRQKRYQLLNDLAGVLQVSPNFLKDKIGSDDDLFISKWLVEHIRGFKKACEDSLKIQKDNRGLLNHKINIARNTKGKCEKEIFNLICKIEGSEDKKGNYKHGLAYELGVLLFGEPNQASKLEFDRKIKKFNSIYSFAQIQQIAFAERKGNANTCAVCSADNAHRMQQIKVAKPVEGNKDNIILSAKAQRLPAIPTRIVDGAVKKIATILARNIVDDNWDNIKQALSNNQQLHVPIITESNAFEFEPALADIKGKSLKDKRKKALERIDPENVFKDKNNRIKEFAKGISAYSDANLANGDFDGAKEELDHIIPRSHKKYGTLNDEANLICVTREDNQNRGNKAVFLYDLKPNYKLKQFNTTDDLEIEKKIADTIWDASKQDFKFGNYRSFINLTPQEQIAFRHALFLADKNPIKKAVIRAIDNRNRTFVNGTQRYFAEVLANNIYLRAKKENLATNRITFDYFGIETTNSNGRGIADVRKLYEKVDSDIQAYAKGDKPQDSYSHLIDAMIAFCVAADEHKNEGSIGLKMGNQYGLFPTPDKYDENTGEIISWHNDDIFRKIKVSDNQFSDKKLVRKKATEGFNTHRQMTRDGIYGESYLPILIHKNLNEVRKGYNWENSEEIKIFKGKKYDIQQLNNLVYCLKFVDKPISIDIQITTLEELRNILETNNISTTAEYYYINLKTQKLHEYYIENYNTALGYKKYTKEMEFLRSLAYRTERVKIKSIDDVSMILAKDSNFKAGKIELPFKTEWQRLYLEWQNTTIKDNHEFLKSYFSVKNATKQHKKVRKDFSLPISTNEGKLLVKRKTWDNNFIYQILNDSDSRADGTKPFIPAFDISKNEIVETIIKSFTSKNIFWLPKNIELQKVDNKSIFAIDTSRWFEVETPKDLIEIGVSTIQYKIDNNSRPKVRVKLDYVMDDDSKINYFMNHSLLKSRYPDKVLEILKQSTIIEFESSGFNKTIKEMLGMTLAGIYNETSNN

SEQ ID NO: 433 - protein, 1629 aa, Francisella tularensis
  source 1..1629: note = Francisella tularensis subsp. novicida
MNFKILPIAIDLGVKNTGVFSAFYQKGTSLERLDNKNGKVYELSKDSYTLLMNNRTARRHQRRGIDRKQLVKKLFKLIWTEQLNLEWDKDTQQAISFLFNRRGFSFITDGYSPEYLNIVPEQVKAILMDIFDDYNGEDDLDSYLKLATEQESKISEIYNKLMQKILEFKLRKLCTDIKDDKVSTKTLKEITSYEFELLADYLANYSESLKTQKFSYTDKQGNLKELSYYHHDKYNIQEFLKRHATINDEILDTLLTDDLDIWNFNFEKFDFDKNEEKLQNQEDKDHTQAHLHHFVFAVNKIKSEMASGGRHRGQYFQEITNVLDENNHQEGYLKNFCENLHNKKYSNLSVKNLVNLIGNLSNLELKPLRKYFNDKIHAKADHWDEQKFTETYCHWILGEWRVGLKDQDKKEGAKYSYKDLCNELKQKVTNAGLIDFLLELDPCRTIPPYLDNNNRKPPKCQSLILNPKFLDNQYPNWQQYLQELKKLQIIQDYLESFETDLKVLKSSKDQPYFVEYKSSNQQIASGQRDYKDLDARILQFIFDRVKASDELLLNEIYFQAKKLKQKASSELEKLESSKKLDEVIANSQLSKILKSQHTNGIFEQGTFLHLVCKYYKQRQRARDSRLYIMPEYRYDKKLDKYNNTGRFDDDNQLLTYCNHKPRQKRYQLLNDLAGVLQVSPNFLKDKIGSDDDLFISKWLVEHIRGFKKACEDSLKIQKDNRGLLNHKINIARNTKGKCEKEIFNLICKIEGSEDKKGNYKHGLAYELGVLLFGEPNEASKPEFDRKIKKFNSIYSFAQIQQIAFAERKGNANTCAVCSADNAHRMQQIKITEPVEDNKDKIILSAKAQRLPAIPTRIVDGAVKKMATILAKNIVDDNWQNIKQVLSAKHQLHIPIITESNAFEFEPALADVKGKSLKDRRKKALERISPENIFKDKNNRIKEFAKGISAYSGANLTDGDFDGAKEELDHIIPRSHKKYGTLNDEANLICVTRDDNKNKGNRIFCLHDLANNYKLKQFETTDDLEIEKKIADTIWDASKKDFKFGNYRSFINLTPQEQKAFRHALFLADENPIKQAVIRAINNRNRTFVNGTQRYFAEVLANNIYLRAKKENLNTDKISFDYFGIPTIGNGRGIAEIRQLYEKVDSDIQVYAKGDKPQASYSHLIDAMLAFCIAADEHRNDGSIGLEIDKNYSLYPLDKNTGEVFTKDIFSQIKITDNEFSDKKLVRKKATEGFNTHRQMTRDGIYAENYLPILIHKELDEVRKGYTWKNSEEIKIFKGKKYDIQQLNNLLYCLKFVDKPISIDIQISTLEELRNILTTNNIAATAEYYYINLKTQKLHEYYIENYNTALGYKKYTKEMEFLRSLAYRSERVKIKSIDDVKQVLDKDSNFIIGKITLPFKKEWQRLYREWQNTTIKDDYEFLKSFFNVKSITKLHKKVRKDFSLPISTNEGKFLVKRKTWDNNFIYQILNDSDSRVDGTKPFIPAFDISKNEIVEAIIDSFTSKNIFWLPKNIELQKVDNKNIFAIDTSKWFEVETPSDLRDIGVATIQYKIDNNSRPKVRVKLDYVIDDDSKINYFTNHSLLKSRYPDKVLEILKQSTIIEFESSGFNKTIKEMLGMTLAGIYNETSNN

SEQ ID NO: 434 - protein, 1629 aa, Francisella tularensis
  source 1..1629: note = Francisella tularensis subsp. novicida
MNFKILPIAIDLGVKNTGVFSAFYQKGTSLERLDNKNGKVYELSKDSYTLLMNNRTARRHQRRGIDRKQLVKRLFKLIWTEQLNLEWDKDTQQAISFLFNRRGFSFITDGYSPEYLNIVPEQVKAILMDIFDDYNGEDDLDSYLKLATEQESKISEIYNKLMQKILEFKLMKLCTDIKDDKVSTKTLKEITSYEFELLADYLANYSESLKTQKFSYTDKQGNLKELSYYHHDKYNIQEFLKRHATINDRILDTLLTDDLDIWNFNFEKFDFDKNEEKLQNQEDKDHIQAHLHHFVFAVNKIKSEMASGGRHRSQYFQEITNVLDENNHQEGYLKNFCENLHNKKYSNLSVKNLVNLIGNLSNLELKPLRKYFNDKIHAKADHWDEQKFTETYCHWILGEWRVGVKDQDKKDGAKYSYKDLCNELKQKVTKAGLVDFLLELDPCRTIPPYLDNNNRKPPKCQSLILNPKFLDNQYPNWQQYLQELKKLQSIQNYLDSFETDLKVLKSSKDQPYFVEYKSSNQQIASGQRDYKDLDARILQFIFDRVKASDELLLNEIYFQAKKLKQKASSELEKLESSKKLDEVIANSQLSQILKSQHTNGIFEQGTFLHLVCKYYKQRQRARDSRLYIMPEYRYDKKLHKYNNTGRFDDDNQLLTYCNHKPRQKRYQLLNDLAGVLQVSPNFLKDKIGSDDDLFISKWLVEHIRGFKKACEDSLKIQKDNRGLLNHKINIARNTKGKCEKEIFNLICKIEGSEDKKGNYKHGLAYELGVLLFGEPNEASKPEFDRKIKKFNSIYSFAQIQQIAFAERKGNANTCAVCSADNAHRMQQIKITEPVEDNKDKIILSAKAQRLPAIPTRIVDGAVKKMATILAKNIVDDNWQNIKQVLSAKHQLHIPIITESNAFEFEPALADVKGKSLKDRRKKALERISPENIFKDKNNRIKEFAKGISAYSGANLTDGDFDGAKEELDHIIPRSHKKYGTLNDEANLICVTRGDNKNKGNRIFCLRDLADNYKLKQFETTDDLEIEKKIADTIWDANKKDFKFGNYRSFINLTPQEQKAFRHALFLADENPIKQAVIRAINNRNRTFVNGTQRYFAEVLANNIYLRAKKENLNTDKISFDYFGIPTIGNGRGIAEIRQLYEKVDSDIQAYAKGDKPQASYSHLIDAMLAFCIAADEHRNDGSIGLEIDKNYSLYPLDKNTGEVFTKDIFSQIKITDNEFSDKKLVRKKAIEGFNTHRQMTRDGIYAENYLPILIHKELNEVRKGYTWKNSEEIKIFKGKKYDIQQLNNLVYCLKFVDKPISIDIQISTLEELRNILTTNNIAATAEYYYINLKTQKLHEYYIENYNTALGYKKYSKEMEFLRSLAYRSERVKIKSIDDVKQVLDKDSNFIIGKITLPFKKEWQRLYREWQNTTIKDDYEFLKSFFNVKSITKLHKKVRKDFSLPISTNEGKFLVKRKTWDNNFIYQILNDSDSRVDGTKPFIPAFDISKNEIVEAIIDSFTSKNIFWLPKNIELQKVDNKNIFAIDTSKWFEVETPSDLRDIGVATIQYKIDNNSRPKVRVKLDYVIDDDSKINYFTNHSLLKSRYPDKVLEILKQSTTIEFESSGFNKTIKEMLGMTLAGIYNETSNN

SEQ ID NO: 435 - protein, 244 aa, Francisella tularensis
ARKQNSEIYNKLMQKILEFKLRKLCTDIKDDKVSTKTLKEITSYEFELLADYLANYSESLKTQKFSYTDKQGNLKELSYYHHDKYNIQEFLKRHATINDEILDTLLTDDFDIWNFNFEKFDFDKNEEKLQNQEDKDHTQAYLHHFVFAVNKIKSEMASGGRHRSQYFQEITNVLDENNHQEGYLKNFCENLHNKKYSNLSVKNLVNLVGNLSNLELKPLRKYFNDKNLIIGMSKSLQKLIATGY

SEQ ID NO: 436 - protein, 501 aa, Francisella tularensis
MEIEKKIADTIWDASKQDFKFGNYRSFINLTPQEQKAFRYALFLADENSIKQAVIRAINNRNRTFVNGTQRYFAEVLANNIYLRAKKENLNTDKISFDYFGIPTIGNGRGIADIRQLYEKVDSDIQAYAKGDKPQASYSHLIDAMIAFCVAADEHRNDGSIGLEIDKNYSLYLLDKNTGEVFTKDIFSQIKITDNEFSDKKLVRKKATEGFNTHRQMTRDGIYAENYLPILIHKELDEVRKGYTWGNSEELKIHKGKKYNIQQLNNIVYCLKFIDKSISIDIQISTLEELRNILTTNNIAATAEYYYINLKNQKLHEYYIENYNTALDYKKYSKEMEFLRSLAYRSERVKIKSIDDVKQVLDKDSNFIIGKITLPFKKEWQRLYLEWQNTTIKDDYEFLKSFFNVKSITKLHKKVRKDFSLPISTNEGKFLVKRKTWDNNFIYQILNDSDSRVDGTKPFIPAFDISKNEIVEAIIDSFTSKNIFWLPKNIELQNVDKIFLL

SEQ ID NO: 437 - protein, 158 aa, Francisella tularensis
MIDFLLELDPCITIPPYLDNNNRKPPKCQSLILNPKFLDNQYPNWQQYLQELKKLQSIQDYLDSFETDLKDLKSSKDQPYFVEYKSSNQQMASGQRDYKDLDARILQFIFDRVKASDELLLNEIYFQAKKLKQKASSELEKLESSKKLDEVIANSQLS

SEQ ID NO: 438 - protein, 878 aa, Francisella tularensis
MLNDLAGVLQVSRNQLLSSVEEWFQQAQRVGEISKSQDEQIFEWLKSFKIASYCKAAVEMQKQYRGTLKNAIQTAIFRQSENINKNKNKNKNTGNQQQALSENSKDVKSLTADEKKLLKLIENIAKASQKIGESLGLNDKQIKKFNSIYNFAQIQQIAFAERKGNANTCAVYSADNAHRMQQIKITELVEDNKDNIILSAKAQRLPAIPTRIVDGAVKKMATILAKNIVDDNWQNIKQVLSAKHQLHIPIITESNAFEFEPALADVKGKSLKDRRKKALERISPENIFKDKNNRIKEFAKGISAYSGANLTDGDFDGAKEELDHIIPRSYKKYGTLNDEVNLICVTRDDNKNKGKRIFCLNDLANNYKLKQFETTDDLEIEKKIADTIWDASKQDFKFGNYRSFINLIPQEQKAFRYALFLADENSIKQAVIRAINNRNRTFVNGTQRYFAEVLANNIYLRAKKENLNTDKISFDYFGIPTIGNGRGIADIRQLYEKVDSDIQAYAKGDKPQASYSHLIDAMIAFCVAADEHRNDGSIGLEIDKNYSLYPLDKNTGEVFTKDIFSQIKITDNEFSDKKLVRKKATEGFNTHRQMTRDGIYAENYLPILIHKELDEVRKGYTWGNSEELKIHKGKKYNIQQLNNIVYCLKFIDKSISIDIQISTLEELRNILTTNNIAATAEYYYINLKNQKLHEYYIENYNTALDYKKYSKEMEFLRSLAYRSERVKIKSIDDVKQVLDKDSNFIIGKITLPFKKEWQRLYLEWQNTTIKDDYEFLKSFFNVKSINKLHKKVRKDFSLPISTNEGKFLVKRKTWDNNFIYQILNDSDSRVDGTKPFIPAFDISKNEIVEAIIDSFTSKNIFWLPKNIELQKVDKIFLL

SEQ ID NO: 439 - protein, 292 aa, Francisella tularensis
MLNDLAGVLQVSRNQLLSSVEEWFQQAQRVGEISKSQDEQIFEWLKSFKIASYCKAAVEMQKQYRGTLKNAIQTAIFRQSENINKNKNKNTGNQQQALSENSKDVKSLTADEKKLLKLIENIAKASQKIGESLGLNDKQIKKFNSIYNFAQIQQIAFAERKGNANTCAVYSADNAHRMQQIKITELVEDNKDNIILSAKAQRLPAIPTRIVDGAVKKMVTILAKNIVDDNWQNIKQVLSAKHQLHIPIITESNAFEFEPALADVKGKSLKDRRKKALERISPENIFKDKNIC

SEQ ID NO: 440 - protein, 53 aa, Francisella tularensis
MNHSLLKSRYPDKVLEILKQSTIIEFESSGFNKTIKEMLGMTLAGIYNETSNN

SEQ ID NO: 441 - protein, 393 aa, Francisella tularensis
MNVKILPIAIDLDVKNTGVFSAFYQKGTSLEKLDNKNGKVYELSKDSYTLLMNNRTAQRHQRRGIDRKQLVKRLFKLVWTEQLNLEWDKDTQQAISFLFNRRGFSFITDGYSTEYLNIVPEQVKAILMDIFDDYNGEDDLDSYLKLATEQESKISEIYNKLMQKILEFKLRKLCTDIKDDKVSTKTLKEITSYEFELLADYLANYSESLKTQKFSYTDKQGNLKELSYYHHDKYNIQEFLKRHATINDEILDTLLTDDFDIWNFNFEKFDFDKNEEKLQNQEDKDHTQAYLHHFVFAVNKIKSEMASGGRHRSQYFQEITNVLDENNHQEGYLKNFCENLHNKKYSNLSVKNLVNLVGNLSNLELKPLRKYFNDKNLIIGMSKSLQKLIATGY

SEQ ID NO: 442 - protein, 1629 aa, Francisella tularensis
MNVKILPIAIDLGVKNTGVFSAFYQKGTSLERLDNKNGKVYELSKDSYTLLMNNRTARRHQRRGIDRKQLVKRLFKLIWTEQLNLEWDKDTQQAISFLFNRRGFSFITDGYSPEYLNIVPEQVKAILMDIFDDYNGEDDLDSYLKLATEQESKISEIYNKLMQKILEFKLRKLCTDIKDDKVSTKTLKEITSYEFELLADYLANYSEILKTQKFSYTDKQGNLKELSYYHHDKYNIQEFLKRHATINDEILDTLLTDDLDIWNFNFEKFDFDKNEEKLQNQEDKDHTQAHLHHFVFAVNKIKSEMASGGRHRGQYFQEITNVLDENNHQEGYLKNFCENLHNKKYSNLSVKNLVNLIGNLSNLELKPLRKYFNDKIHAKADHWDEQKFTETYCHWILGEWRVGVKDQDKKDGAKYSYKDLCNELKQKVTKAGLVDFLLELDPCRTIPPYLDNNNRKPPKCQSLILNPKFLDNQYPNWQQYLQELKKLQSIQNYLESFETDLKVLKSSKDQPYFVEYKSSNQQIASGQRDYKDLDARILQFIFDRVKASDELLLNEIYFQAKKLKQKASSELEKLESSKKLDEVIANSQLSQILKSQHTNGIFEQGTFLHLVCKYYKQRQRARDSRLYIMPEYRYDKKLDKYNNTGRFDDDNQLLTYCNHKPRQKRYQLLNDLAGVLQVSPNFLKDKIGSDDDLFISKWLVEHIRGFKKACEDSLKIQKDNRGLLNHKINIARNTKGKCEKEIFNLICKIEGSEDKKGNYKHGLAYELGVLLFGEPNEASKPEFDRKIKKFNSIYSFAQIQQIAFAERKGNANTCAVCSADNAHRMQQIKITEPVEDNKDKIILSAKAQRLPAIPTRIVDGAVKKMATILAKNIVDDNWQNIKQVLSAKHQLHIPIITESNAFEFEPALADVKGKSIKDRRKKALERISPENIFKDKNNRIKEFAKGISAYSGDNLASGDFDGAKEELDHIIPRSHKKYGTLNDEANLICVTRDDNKNKGNRIFCLHDLANNYKLKQFETTDDLEIEKKIADTIWDASKKDFKFGNYRSFINLTPQEQKAFRHALFLADENPIKQAVIRAINNRNRTFVNGTQRYFAEVLANNIYLRAKKENLNTDKISFDYFGIPTIGNGRGIVEIRQLYEKVDSDIQAYAKGDKPQASYSHLIDAMLAFCIAADEHRNDGSIGLEIDKNYSLYPLDKNTGEVFTKDIFSQIKITNNEFSDKKLVRKKATEGFNTHRQMTRDGIYAENYLPILIHKELDEVRKGYTWGNSEELKIHKGKKYDIQQLNNLVYCLKFIDKSISIDIQISTLEELRNILTTNNIATTAEYYYINLKTQKLHEYYIENYNTALGYKKYTKEMEFLRSLAYRSERVKIKSIDDVKQVLDKDSNFIIGKITLPFKKEWQRLYREWQNTTIKDDYEFLKSFFNVKSITKLHKKVRKDFSLPISTNEGKFLVKRKTWDNNFIYQILNDSDSRVDGTKPFIPAFDISKNEIVEAIIDSFTSKNIFWLPKNIELQKVDNKNIFAIDTSKWFEVETPSDLRDIGVATIQYKIDNNSRPKVRVKLDYVIDDDSKINYFTNHSLLKSRYPDKVLEILKQSTIIEFESSGFNKTIKEMLGMTLAGIYNETSNN

SEQ ID NO: 443 - protein, 285 aa, Francisella tularensis
MTRDGIYAENYLPILIHKELDEVRKGYTWGNSEELKIHKGKKYNIQQLNNIVYCLKFIDKSISIDIQISTLEELRNILTTNNIAATAEYYYINLKNQKLHEYYIENYNTALDYKKYSKEMEFLRSLAYRSERVKIKSIDDVKQVLDKDSNFIIGKITLPFKKEWQRLYLEWQNTTIKDDYEFLKSFFNVKSITKLHKKVRKDFSLPISTNEGKFLVKRKTWDNNFIYQILNDSDSRVDGTKPFIPAFDISKNEIVEAIIDSFTSKNIFWLPKNIELQKVDKIFLL

SEQ ID NO: 444 - protein, 1323 aa, Fructobacillus fructosus
MVYDVGLDIGTGSVGWVALDENGKLARAKGKNLVGVRLFDTAQTAADRRGFRTTRRRLSRRKWRLRLLDELFSAEINEIDSSFFQRLKYSYVHPKDEENKAHYYGGYLFPTEEETKKFHRSYPTIYHLRQELMAQPNKRFDIREIYLAIHHLVKYRGHFLSSQEKITIGSTYNPEDLANAIEVYADEKGLSWELNNPEQLTEIISGEAGYGLNKSMKADEALKLFEFDNNQDKVAIKTLLAGLTGNQIDFAKLFGKDISDKDEAKLWKLKLDDEALEEKSQTILSQLTDEEIELFHAVVQAYDGFVLIGLLNGADSVSAAMVQLYDQHREDRKLLKSLAQKAGLKHKRFSEIYEQLALATDEATIKNGISTARELVEESNLSKEVKEDTLRRLDENEFLPKQRTKANSVIPHQLHLAELQKILQNQGQYYPFLLDTFEKEDGQDNKIEELLRFRIPYYVGPLVTKKDVEHAGGDADNHWVERNEGFEKSRVTPWNFDKVFNRDKAARDFIERLTGNDTYLIGEKTLPQNSLRYQLFTVLNELNNVRVNGKKFDSKTKADLINDLFKARKTVSLSALKDYLKAQGKGDVTITGLADESKFNSSLSSYNDLKKTFDAEYLENEDNQETLEKIIEIQTVFEDSKIASRELSKLPLDDDQVKKLSQTHYTGWGRLSEKLLDSKIIDERGQKVSILDKLKSTSQNFMSIINNDKYGVQAWITEQNTGSSKLTFDEKVNELTTSPANKRGIKQSFAVLNDIKKAMKEEPRRVYLEFAREDQTSVRSVPRYNQLKEKYQSKSLSEEAKVLKKTLDGNKNKMSDDRYFLYFQQQGKDMYTGRPINFERLSQDYDIDHIIPQAFTKDDSLDNRVLVSRPENARKSDSFAYTDEVQKQDGSLWTSLLKSGFINRKKYERLTKAGKYLDGQKTGFIARQLVETRQIIKNVASLIEGEYENSKAVAIRSEITADMRLLVGIKKHREINSFHHAFDALLITAAGQYMQNRYPDRDSTNVYNEFDRYTNDYLKNLRQLSSRDEVRRLKSFGFVVGTMRKGNEDWSEENTSYLRKVMMFKNILTTKKTEKDRGPLNKETIFSPKSGKKLIPLNSKRSDTALYGGYSNVYSAYMTLVRANGKNLLIKIPISIANQIEVGNLKINDYIVNNPAIKKFEKILISKLPLGQLVNEDGNLIYLASNEYRHNAKQLWLSTTDADKIASISENSSDEELLEAYDILTSENVKNRFPFFKKDIDKLSQVRDEFLDSDKRIAVIQTILRGLQIDAAYQAPVKIISKKVSDWHKLQQSGGIKLSDNSEMIYQSATGIFETRVKISDLL

SEQ ID NO: 445 - protein, 1367 aa, Fusobacterium sp.
MKKQKFSDYYLGFDIGTNSVGWCVTDLDYNVLRFNKKDMWGSRLFDEAKTAAERRVQRNSRRRLKRRKWRLNLLEEIFSDEIMKIDSNFFRRLKESSLWLEDKNSKEKFTLFNDDNYKDYDFYKQYPTIFHLRDELIKNPEKKDIRLIYLALHSIFKSRGHFLFEGQNLKEIKNFETLYNNLISFLEDNGINKSIDKDNIKKLEKIICDSGKGLKDKEKEFKEIFNSDKQLVAIFKLSVGSSVSLNDLFDTDEYKKEEVEKEKISFREQIYEDDKPIYYSILGEKIELLDIAKSFYDFMVLNNILSDSNYISEAKVKLYEEHKKDLKNLKYIIRKYNKENYDKLFKDKNENNYPAYIGLNKEKGKKEVVEKSGLKIDDLIKVIKGYLPKPERIEEKDKTIFNEILNKIELKTILPKQRISDNGTLPYQIHEVELEKILENQSKYYDFLNYEENGVSTKDKLLKTFKFRIPYYVGPLNSYHKDKGGNSWIVRKEEGKILPWNFEQKVDIEKSAEEFIKRMTNKCTYLNGEDVIPKDSFLYSEYIILNELNKVQVNDEFLNEENKRKIIDELFKENKKVSEKKFKEYLLVNQIANRTVELKGIKDSFNSNYVSYIKFKDIFGEKLNLDIYKEISEKSILWKCLYGDDKKIFEKKIKNEYGDILNKDEIKKINSFKFNTWGRLSEKLLTGIEFINLETGECYSSVMEALRRTNYNLMELLSSKFTLQESIDNGNKEMNEVSYRDLIEESYVSPSLKRAILQTLKIYEEIKKITGRVPKKVFIEMARGGDETMKNKKIPARQEQLKKLYDSCGNDIANFSIDIKKMKSSLSSYDNNSLRQKKLYLYYLQFGKCMYTGREIDLDRLLQNNDTYDIDHIYPRSKVIKDDSFDNLVLVLKNENAEKSNEYPVKKEIQEKMKSFWRFLKEKNFISDEKYKRLTGKDDFELRGFMARQLVNVRQTTKEVGKILQQIEPEIKIVYSKAEIASSFREMFDFIKVRELNDTHHAKDAYLNIVAGNVYNTKFTEKPYRYLQEIKENYDVKKIYNYDIKNAWDKENSLEIVKKNMKKNTVNITRFIKEEKGQLFDLNPIKKGETSNEIISIKPKLYNGKEEKLNEKYGYYKSLNPAYFLYVEHKEKNKRIKSFERVNLVDVNNIKDEKSLVKYLIENKKLVEPRLIKKVYKRQVILINDYPYSIVALDSNKLMDFENLKPLFLENKYEKILKNVIKFLEDNQGKSEENYKFIYLKKKDRYEKNETLESVKDRYNLEFNEMYDKFLEKLDSKDYKNYINNKKYKNLLDVKEKFIKLNLFDKAFTLKSFLDLFNRKTMADFSKVGLTKYLGKIQKISSNVLSKNELYLLEESVTGLFVKKIKL

SEQ ID NO: 446 - protein, 1367 aa, Fusobacterium sp.
MKKQKFSDYYLGFDIGTNSVGWCVTDLDYNVLRFNKKDMWGSRLFDEAKTAAERRVQRNSRRRLKRRKWRLNLLEEIFSDEIMKIDSNFFRRLKESSLWLEDKNSKEKFTLFNDDNYKDYDFYKQYPTIFHLRDELIKNPEKKDIRLIYLALHSIFKSRGHFLFEGQNLKEIKNFETLYNNLISFLEDNGINKSIDKDNIKKLEKIICDSGKGLKDKEKEFKEIFNSDKQLVAIFKLSVGSSVSLNDLFDTDEYKKEEVEKEKISFREQIYEDDKPIYYSILGEKIELLDIAKSFYDFMVLNNILSDSNYISEAKVKLYEEHKKDLKNLKYIIRKYNKENYDKLFKDKNENNYPAYIGLNKEKGKKEVVEKSGLKIDDLIKVIKGYLPKPERIEEKDKIIFNEILNKIELKTILPKQRISDNGTLPYQIHEVELEKILENQSKYYDFLNYEENGVSTKDKLLKTFKFRIPYYVGPLNSYHKDKGGNSWIVRKEEGKILPWNFEQKVDIEKSAEEFIKRMTNKCTYLNGEDVIPKDSFLYSEYIILNELNKVQVNDEFLNEENKRKIIDELFKENKKVSEKKFKEYLLVNQIANRTVELKGIKDSFNSNYVSYIKFKDIFGEKLNLDIYKEISEKSILWKCLYGDDKKIFEKKIKNEYGDILNKDEIKKINSFKFNTWGRLSEKLLTGIEFINLETGECYSSVMEALRRTNYNLMELLSSKFTLQESIDNGNKEMNEVSYRDLIEESYVSPSLKRAILQTLKIYEEIKKITGRVPKKVFIEMARGGDETMKNKKIPARQEQLKKLYDSCGNDIANFSIDIKKMKSSLSSYDNNSLRQKKLYLYYLQFGKCMYTGREIDLDRLLQNNDTYDIDHIYPRSKVIKDDSFDNLVLVLKNENAEKSNEYPVKKEIQEKMKSFWRFLKEKNFISDEKYKRLTGKDDFELRGFMARQLVNVRQTTKEVGKILQQIEPEIKIVYSKAEIASSFREMFDFIKVRELNDTHHAKDAYLNIVAGNVYNTKFTEKPYRYLQEIKENYDVKKIYNYDIKNAWDKENSLEIVKKNMKKNTVNITRFIKEEKGQLFDLNPIKKGETSNEIISIKPKLYNGKEEKLNEKYGYYKSLNPAYFLYVEHKEKNKRIKSFERVNLVDVNNIKDEKSLVKYLIENKKLVEPRLIKKVYKRQVILINDYPYSIVALDSNKLMDFENLKPLFLENKYEKILKNVIKFLEDNQGKSEENYKFIYLKKKDRYEKNETLESVKDRYNLEFNEMYDKFLEKLDSKDYKNYINNKKYKNLLDVKEKFIKLNLFDKAFTLKSFLDLFNRKTMADFSKVGLTKYLGKIQKISSNVLSKNELYLLEESVTGLFVKKIKL

SEQ ID NO: 447 - protein, 1367 aa, Fusobacterium sp.
MKKQQFSDYYLGFDIGTNSVGWCVTDFNYNVLRFNKKDMWGSRLFDEAKTAAERRVQRNSRRRLKRRKWRLNLLEEIFSDEILKIDSNFFRRLKESSLWLEDKSSKEKFTLFNDDNYKDYDFYKQYPTIFHLRNELIKNPEKKDIRLVYLALHSIFKSRGHFLFEGQNLKDIKNFETLYNNLMAFLEDNDIYKNIDSSYIGNLENIICDSKKGLKDKEKEFKEIFNSDKQLVGFFKLSVGSSVSLNDLFDTDEYKKGEVEKEKISFREQIYEDDKPIYYSILGEKIEFLDIAKSFYDFMVLNNILADSQYISEAKVKLYDEHKRDLKNLKYIIRKYNKENYDKLFKDKNESNYSAYIGLNKEKGKKEVIEKSRLKIDDFAKIIKGYLPKAEKIDEKDRSIFNEILDKIELKTILPKQRISDNGTLPYQIHEAELEKILENQAKYYDFLNHEENGISTKDKLLMTFKFRIPYYVGPLNSYHKNKGGNSWIVRKEEGKILPWNFEQKVDIEKSAEEFIKRMTNKCTYLNGEDVIPKDSFLYSEYIILNELNKVQVNDEFLNKEIKKKIIEDLFKKSKKISEKNFREYLLVNQITNKTVELKGVKDAFNSNYVSYIKFKDIFGDKLNLDIYKEISEKSILWKCLYGDDKKIFEKKIKSVYGDILTKDEIKKINSFKFNTWGRLSEKLLTEIEFIDLETGECYSSVMDALRRTNYNLMELLSSKFTLQENIDNENKEVSEFSYRDLVEESYVSPSLKRAILQTLKIYEEIRKITGRIPKKVFIEMARGGDETMKNKKIPARQEQLKKLYDSCGKDISNFSIDIKEMKNSLNSYDNNSLRQKKLYLYYLQFGKCMYTGKEIDLNRLLQNNDTYDIDHIYPRSKVIKDDSFDNLVLVLKNENAEKSNEYPLKKEIQEKMKSFWKFLKEKNFISDEKYKRLTGKDEFELRGFMARQLVNVRQTTKEAGKILQQIEPEIKIVYSKAEIASSFREMFDFIKVRELNDTHHAKDAYLNIVAGNVYNTKFTEKPYRYLQEIKENYDVKKIYNYDIKNAWDKEKSLEIVKKNMEKNTVNITRFIKEEKGQLFDLNPIRKGETSNEIIAIKPKFYEGSTEKLNEKYGYYKSLNPAYFIYVEHKEKNKIIRSFERVNLVDVNKIKDEKSLIKYLIENKGLIEPKVIKKVYKRQVILINNFPYSIVALDSNKLMDFENLKPLFLERKYEKILKNAIKFLEDNQGKTEEYYKFLYLKKKDRNEKNETIDSVKERYNIEFNEMYDKFLEKLDSKDYKNYINNKKYSELVNVKEKFIKLNLFDKAFTLKSFLDLFNRKTMADFSKVGLTKYLGKIQKISSNVLSKNELHLLEESVTGLFVKKIKL

SEQ ID NO: 448 - protein, 1391 aa, Galbibacter sp.
MKTILGLDLGTNSIGWALVKEAENENEVSDIIKLGVRVNPLTVDELTNFEGGKAYSNNAERTLKRGARRNLQRYKLRRENLIEILLKNGLINKDTALTEVGKETTHQTLKLRSKSANEKVSLEDLAKILLSINKKRGYKSSRKVNAEDDGVAIDGMEVAKLLYDENMTPGEYVLRLLESGKKHLPDFYRSDLQEEFNLVWKKQSEFYPLILTKELFFELHGKNKSQTWAICKEPLGIVGVKLKGSAKEQKFARYRLRKEALTQQIELEHLAIVLQDINNDSNKSSGYLGAISDRSKELFFNKETVGQYQYKQLQKDPNTSLKNQVFYRQDYLDEFEVIWRNQAKFYPQLTNELKQEIRDVVIFYQRKLKSQKNLISFCQFESTQQNYVEKETGKTKIRTIGRRVIPRSSPLFQEFKIWQSLNNLKFVNSESNQIIQFIELEDDVKKVVFDELNLRGDLKPNQVLKILSKYMKIGKLTQWKCNLEEIEGNRTNSALYNVFQMIAEEEGYGFNWGKKSALEIKSELKAIFSSIGINDSILDFDFSKKLDQQLSYQLWHLLYSAEEGNSKITEEDKFTYGNTGVALKKKLHLKFGFKPEYSTLISNLRFTSDYGNLSSKAISKILPFLRDGSDYSKACQYAGYNHSNSLSADELDNRELKPKLELLKKNSLRNPVVEKILNQMVNVVNQVIDNYGKPDEVRIELARELKKSAKERSQMTKNISDATRRNAEIKKYLSKEFGIPNPTKGDVIRYRLWEELASNGYKDLFRDKYIPKEKLFSNEIDIEHIIPKALLFDDSFSNKTLAFKVDNLKKADRTAFDFMSTDFSKDVDSYIGRIETLHKDGKISSSKYKKLMIPKSKLVDGFIERDLRNTQYIAKQARKMLLEVFKTVVPTTGKITDKLREDWDLINVMKELNFPKYKALGLTKKIERFDVGSEKIKSINVIEGWSKRNDHRHHAMDALAVAFTTHNHIQYLNYLNARKDIHHEMHGTIKSIENQIIGKDVMGKRRFIPPISDLRMKAKLQIESILISFKNKNKVVTWSVNKTKLKGKDNYNKRRQLTPRGQLHKETVYGKIKLIDPKPLKLNNKFTLVRASMIVDKVHREIVLQHLSKYDNNSEVAFDSKTIKIDPILIEGIGLKEVVCYEDVFKIRKKISGDNFKNEKHLEKVIDEKVKQILKDRVIKFQGNFKEAFSNLEENPIWLNKSKGIAVKSVAIKGVNNAESLHEGKDHFGDQILDKNKKQIPVDFVSTGNNHHVGIYEDKDGNLQERVVSFFEAVTRVNEGLPIIDKTYNSDIGWKFKFTMKQNEMFVFPSDDFDPNEFDLTDGKNAAKISPNLYRVQKIATKNYMFRHHLETVVTNDLEFTYKSIRSTGWLRNLVKVRINHLGEIVYVGEY

SEQ ID NO: 449 - protein, 1186 aa, Gardnerella vaginalis
MEGNISYAIGIDVGLNSVGLAAIRLDDYGEPIRILKAMSVIHDAGIDPNGAKESDTRKAISGVARRVRRLYRQRRRRLQKLDFLLQSLGWPVVENKDLDFSDSFIPWIFRAKLADEYIADEEQRKQMLSVAIRHIARHRGWRNPYQSIKSMMQETEYSEFYNELLKNIEKLAPGVGCEGSTPAQLVRDYLLSQQGKASRRLRITTGGRRKNHPHSLDPVLPRKLMQSDNMLEILNIFNVQHIDDKYVREQIINAVFYAESPRGSAENRVGKDAITGKGKRALKASLAFQKYRIISTISNLRIRENSKERCLTIEEKQNVYKLLTTSIDKSSKRKSAEAPLYTWIDVADCLGIERYKLRGVGSQIGDGESVGNRPPMLNSELAILYANNKSLGQSLITWWLASNRTQEDKEALIEILSNTVDIEAIHDNPEYQDKYGSAIAFIDSMNETEIAALENISLPDGRAAYSLETLDELNKQMLETDDDLFEARKKLFNLPNNWRPAEAPIAEPTGNPSVDRVLKIVHRFLISAKNRWGNPERINIEHVRSGFQSKKMANSYKELLDKRTEGKENLKAMMRNSLHLGTSDSISDADIRRYEAVQRQNGQCLYCGSEITYHTCELDHIVPRKGPGSTNTRENLVATCSSCNAQKCNTPFATWCEQSTYCKNHDISADSAINRVRAFIFPPNSYDKRGANQFKKEVIARLKQKVGDEAFDNRSIESVAWMANELHRRIDWYYNSQNYQTNNGISDISNKAQTNVGVYAGSLTAIARRMSGIDGKLEFFDGRRKTRFDRRHHAVDASVIAMMTPGIAQILAIKCNLRETQLLQGNKVVPGGIDWKEYPTANDQGYQQYANWSVRMNALLKLLNEEMRADRIAVVNSIRLRYSNSSVHQYEVNALLKLHVGDEIDSETIRRSSTPALYCALTRNPDYDVNNGFPENPGRTILLHNKKLNADDSITFFKAQAVQLFVREGSAKIGNSIHHLRIYEYFEKLKSGKIKKSYGMIRVFQNDLHRHIHEDLFSCDLPEQSISMRYADTKVAHAVQTGNANYLGYLVPGDEIIVDFSHITLSENIGKFVEFLNKIGADCTAYRHWVVVGTDTEKVLILKPSMISSEGIDKLYSNCERNNFDYSSYEKSINEILAGKGWRVSVNVLAQYKAATIRRNALGEVRWASRSHLPISWSWDTGENRE

SEQ ID NO: 450 - protein, 1186 aa, Gardnerella vaginalis
MEGNISYAIGIDVGLNSVGLAAIRLDNNGEPIRILKAMSVIHDAGIDPNGAKESDTRKAISGVARRVRRLYRQRRRRLQKLDFLLHSLGFPVVENKDLDFSDSFIPWIFRAKLADEYIADEKQRKQMLSVAIRHIARHRGWRNPYQSIKSMTQETEYSEFYNELLKNIEKFAPGVGCEGSTPAQLVRDYLLLQQGKASRRLRITTDEKRKNHPNSLNPILPRKLMQSDNMLEILNIFNVQHIDDKYVREQIINAVFYAKSPRGSAENRVGKDAITGKGKRALKASLAFQKYRIISTISNLRIRENSKERCLTIEEKQSVYKLLTTSTDESSKEKSAEAPLYTWIDVADCLGIERYKLRGVGSQIGDGESVGNRPPMLNSELAIIYANNKSLGKSLLTWWLDANRTQEDKEALIEILSNTVDIEAIHDNPEYQDKYGSAIAFIDSMDETEIAALENISLPDGRAAYSLETLDKLNKQMLETDDDLFEARKKLFNLPNNWRPSEAPIAEPTGNPSVDRVLKIVHRFLISAKNRWGNPERINIEHVRSGFKSKKMANSYKELLDKRTKGKENLKAMMRNSLHLGMSDSISDADIRRYEAVQRQNGQCLYCGSEITYHTCELDHIVPRKGPGSTNTRENLVATCSLCNAQKCNTPFSTWCEQSTYCKNHDISVDSAINRVRAFIFPPNSYDKRGANQFKKEVIARLKQKVGDEAFDNRSIESVAWMANELHRRIDWYYNSQNYQTNNGISDITNKAQTNVGVYAGSLTAIARRMSGIDGKLEFFDGRRKTRFDRRHHAVDASVIAMMTPGIAQILAIKCNLRETQLLQGNKVVPGGIDWKEYPTANDQGYQQYANWSVRMNALLKLLNEEMRADRIAVVNSIRLRYNNSSVHQYKVNALLKLHVGDEIDSGTIRRSSTPALYCALTRNPDYDVNNGLPENPNRAILLHDKKLNADDSITFFKAQAVQLFVREGSAEIGSSTHHLRIYEYFKKLKSGKIKKSYGMIRVFQNDLHRHIHEDLFSCDLPEQSISMRYADTEVAHAVQTGNSNYLGYLVPGDEIIVDFSHVKLSGNIGTFVEFLNKIGANCAAYNHWVVVGTDTEKVLILKPSMISSEGIDKLYSNCKRNNFDYSSYEKSINEILVGKGWRVSVNVLAKYNAETIRRNALGEVRWTSRSHLPISWSWNTGENRE

SEQ ID NO: 451 - protein, 1258 aa, Gemella haemolysans
MTEENPDIRKVFLAIHHILKNRGHFLLQGQSFKEGNLNNLIKELLNLDILHISIEITEENINKITEIALEKKTLTDKVNDLKKIYPKEKQLLEAFRLIFGGKTSLDKLFAIDEYKELDASVKSVSFKEKIYEEVRHDYEQVLSNYIELLDLAKLVYDSIILSDIKKEGKTLSESKVELYHKHREDLTKLKTLVKNDSKLSEDKKVELYSAIFKEDKDKGTNYVNYIRKSEEGKGCNYEDFKKFLVKELAKLEESSAKEEILRDLELELFLPLQRTKDNSVVPYQIHKEELVKILDNAAKYHKFLNEKDDSGYSIIEKVIQLLEFRIPYYVGPLNSSKKAKVDGFAWSVRNKGYENTPVTPWNYEKVIDESASAEKFITNLTNKCTYLKGEDVLPKSSLLYSEFALLNELNALKYDGNRISLEARNVIIEKLFKEQGKKVTKTSIKNLLKAEGYIDGKGEITGIDITVKNDLKSYRDFKKILGDKFNTEHVENIILWITLYGESRKLIKAKIEAVYGDIYSKEEIAKMSRLVYKDWGRFSRKLLTELVSKKLYNEETGECLNIIGAMRQNNILFMELLADRFDYSQQIIDYNKELQKEVTEITPEILDDLYVSPSVKRSIWQTVRIVEELKKIIGCAPAKIFVETTRSNQDKKKPTDSRKKQLELFYKAVKKDVKDLEKEIGSLNFDKLNERLSSVEPSKLKAKKLYLYYTQLGRCMYSGETIDITQLNTTAYDIDHIYPQSKVKDDSFTNTVLVKREYNAAKTDRYPLGSDIQTPSNRRFWKFLKEKGLITDEKYNRLVRTEEFSDEELTGFIARQLVETSQSVKAVAGILGELNPKTSICYSKAENVSSFRQNFGKIKEGNRKSDNTEQLIKVREINDYHHAKDAYLNVVVGNVYDTKFTRNVFNFIKDKKDGRKYSLNNVFYENVSNSNNVAWELNKTVHQVEKVMNNNNILVTRRTSEQKGGLFDATVYKAKVAAKAKEGVYYPLKTSDPVVNDVTKYGGFTKVKIAYYSIFEYTLVNKKGEEKITRIIPIPIYVSQNIKDDSTLLEFGKTQINIKSGEEVKDFKLKYRKLCIGDLVKINNFFNFIGGKTNDSFVYDGAVQVTLDTESERYIKTLSKYQNWKKENKDGELWESITKEKNTELYNLLVEKMNSGIFIKKKPNKFNELNSEEIRNNFSSISLEEQAKVLLEVLNLLTNKKSIFDLKSINITAARGKISFNLSNLSQFSIIEQSVAGFYEKEITIIGDKENDMENNNC

SEQ ID NO: 452 - protein, 1054 aa, Haemophilus parainfluenzae
MENKNLNYILGLDLGIASVGWAVVEIDEKENPLRLIDVGVRTFERAEVPKTGESLALSRRLARSARRLTQRRVARLKKAKRLLKSENILLSTDERLPHQVWQLRVEGLDHKLERQEWAAVLLHLIKHRGYLSQRKNESKSENKELGALLSGVDNNHKLLQQATYRSPAELAVKKFEVEEGHIRNQQGAYTHTFSRLDLLAEMELLFSRQQHFGNPFASEKLLENLTALLMWQKPALSGEAILKMLGKCTFEDEYKAAKNTYSAERFVWITKLNNLRIQENGLERALNDNERLALMEQPYDKNRLFYSQVRSILKLSDEAIFKGLRYSGEDKKAIETKAVLMEMKAYHQIRKVLEGNNLKAEWAELKANPTLLDEIGTAFSLYKTDEDISAYLAGKLSQPVLNALLENLSFDKFIQLSLKALYKLLPLMQQGLRYDEACREIYGDHYGKKTEENHHFLPQIPADEIRNPVVLRTLTQARKVINGVVRLYGSPARIHIETGREVGKSYKDRRELEKRQEENRKQRENAIKEFKEYFPHFAGEPKAKDILKMRLYKQQNAKCLYSGKPIELHRLLEKGYVEVDHALPFSRTWDDSFNNKVLVLANENQNKGNLTPFEWLDGKHNSERWRAFKALVETSAFPYAKKQRILSQKLDEKGFIERNLNDTRYVARFLCNFIADNMHLTGEGKRKVFASNGQITALLRSRWGLAKSREDNDRHHALDAVVVACSTVAMQQKITRFVRFEAGDVFTGERIDRETGEIIPLHFPTPWQFFKQEVEIRIFSDNPKLELENRLPDRPQANHEFVQPLFVSRMPTRKMTGQGHMETVKSAKRLNEGISVIKMPLTKLKLKDLELMVNREREKDLYDTLKARLEAFNDDPAKAFAEPFIKKGGAIVKSVRVEQIQKSGVLVREGNGVADNASMVRVDVFTKGGKYFLVPIYTWQVAKGILPNKAATQYKDEEDWEVMDNSATFKFSLHPNDLVKLVTKKKTILGYFNGLNRATGNIDIKEHDLDKSKGKQGIFEGVGIKLALSFEKYQVDELGKNIRLCKPSKRQPVR

SEQ ID NO: 453 - protein, 1052 aa, Haemophilus parainfluenzae
MKNTSLNYVLGLDLGISSVGWAVVEIDEKENPLSLIDVGVRTFERAETQKGESLALARRLARSARRLTQRRVARLKKAKRLLKSENILLSTDECLPHQVWQLRVEGLERKLERQEWAAVLLHLIKHRGYLSQRKNESKSENKELGALLSGVANNHKLLQQTTYRTPAELAVKKFEVEEGHIRNQQGSYTHTFSRLDLLSEMELLFSRQQHFGNPFTSEKLLENLTALLMWQKPALSGDAILKMLGKCTFENEYKAAKHTYSAERFIWITKLNNLRIQENGLERALNDNERLALMKQPYEKAKLTYAQVRSILNLSDEAIFKGLRYSGEDKKTSETKTVLMEMKAYHQIRLALEKNDLKTEWAELKVNSSLLDEIGTAFSLYKTDEDISTCLAGKLSQPVLNALLENLNFDKFIQLSLKALHKILPLMQQGLRYDEACAEIYGDHYGKKTEENHLLLPQIPADEIRNPVVLRTLTQARKVINGVVRLYSSPARIHIETGREVGKSYQDRRELEKRQEENRKQREKAISEIKTLFPNFSGEPKAKDILKMRLYYQQNAKCLYSGKPLELHRLLEQGYVEIDHALPFSRTWDDSFNNKVLVLANENQNKGNLTPFEWLDGKNNSERWKAFKALVETSAFPYTKKQRILSQKLDEKGFIERNLNDTRYVARFLCNFIADNMHLTGEGKRKVFASNGQITALLRGRWGLAKSREDNDRHHALDAVVVACSTVSMQQKITRFVRFEEGNVFTGERIDRETGEIIPLHFPAPWKFFREEVEIRIFSDNPKLELENRLIARPQANHEFVQPLFVSRMPTRKMIGQGHMETIKSAKRLNEGLSVIKMLLTKLRLKDLESMVNREREKELYEALKARLEAFNDEPAKAFAEPFMKKGGAIVKSVRVEQVQKSGVLVRDGNGVADNASMVRVDVFTKGGKYFLVPIYTWQVAKGILPNKAVIQGKNEEDWEVMDDATFRFSLHQNDLVKLVTKKKTIFGYFNGLNRATGNIDIKEHDLEKSKVKDGIHQSIGIKLALSFEKYQVDELGKNIRLCKSSKRQAVR

SEQ ID NO: 454 - protein, 121 aa, Haemophilus pittmaniae
MLNRRYAAKITRFVRFEAGDVFTGERIDRETGEIIPLHFPTPWQFFKQEVEIRIFSDNPKLELENRLPDRPQANHEFVQPLFVSRMPTRKMTGQGHMETVKSAKRLNEGISVIKMPLTKLN

SEQ ID NO: 455 - protein, 203 aa, Haemophilus pittmaniae
MVNREREKDLYDALKARLEAFNDDPAKAFAEPFIKKGGAIVKSVRVEQVQKSGVLVREGNGVADNASMVRVDVFTKDGKYFLVPIYTWQVAKGILPNKAATQYKDEEDWEVMDNSAIFKFSLHPNDLVKLVTKKKTILGYFNGLDRATGNIAIKEHDLEKSKAKGGIHQGVGIKLALSFEKYQIDELGKNIRLCNPSKCQSVR

SEQ ID NO: 456 - protein, 1052 aa, Haemophilus sputorum
MKNTSLNYVLGLDLGISSVGWAVVEIDEKENPLSLIDVGVRTFERAETQKGESLALARRLARSARRLTQRRVARLKKAKRLLKSENILLSTDECLPHQVWQLRVEGLERKLERQEWAAVLLHLIKHRGYLSQRKNESKSENKELGALLSGVANNHKLLQQTTYRTPAELAVKKFEVEEGHIRNQQGSYTHTFSRLDLLSEMELLFSRQQHFGNPFTSEKLLENLTALLMWQKPALSGDAILKMLGKCTFENEYKAAKHTYSAERFIWITKLNNLRIQENGLERALNDNERLALMKQPYEKAKLTYAQVRSILNLSDEAIFKGLRYSGEDKKTSETKTVLMEMKAYHQIRLALEKNDLKTEWAELKVNSSLLDEIGTAFSLYKTDEDISTCLAGKLSQPVLNALLENLNFDKFIQLSLKALHKILPLMQQGLRYDEACAEIYGDHYGKKTEENHLLLPQIPADEIRNPVVLRTLTQARKVINGVVRLYSSPARIHIETGREVGKSYQDRRELEKRQEENRKQREKAISEIKTLFPNFSGEPKAKDILKMRLYYQQNAKCLYSGKPLELHRLLEQGYVEIDHALPFSRTWDDSFNNKVLVLANENQNKGNLTPFEWLDGKNNSERWKAFKALVETSAFPYTKKQRILSQKLDEKGFIERNLNDTRYVARFLCNFIADNMHLTGEGKRKVFASNGQITALLRGRWGLAKSREDNDRHHALDAVVVACSTVSMQQKITRFVRFEEGNVFTGERIDRETGEIIPLHFPAPWKFFREEVEIRIFSDNPKLELENRLIARPQANHEFVQPLFVSRMPTRKMTGQGHMETIKSAKRLNEGLSVIKMLLTKLRLKDLESMVNREREKELYEALKARLEAFNDEPAKAFAEPFMKKGGAIVKSVRVEQVQKSGVLVRDGNGVADNASMVRVDVFTKGGKYFLVPIYTWQVAKGILPNKAVIQGKNEEDWEVMDDATFRFSLHQNDLVKLVTKKKTIFGYFNGLNRATGNIDIKEHDLEKSKVKDGIHQSIGIKLALSFEKYQVDELGKNIRLCKSSKRQAVR

SEQ ID NO: 457 - protein, 1338 aa, Helcococcus kunzii
MQDYYLGLDIGTNSVGWAVTDENYNLLRKKGKDLWGVRLFKEAQPATERRGHRSSRRRTIRKSLRKQLLRELFEEEINAIDKDFFLRLDESKYWLEDKKIEGKYSLFNDENFTDKDYYEKFPTIFHLRKALIESDDKEDIRLYFLAINQMMKRRGHFLIDGKLSNVEDITPFKECIQNLINEELDTEIETEFYDKAIKIVSDYSLKKTEKKNLIKDLVKETDSIEDSKKIINIFNLLISGKSKVNGIFDDEEILEKIKEDNKEDFYLTSEKYEENLEYFSQLLDYRFELISSLKSIYDYIILQEVLKGKKYLSYAQVERYKNHKEDLRKLKQLIKKYDKNGKIYYQIFRDENFKKGYVAYLGYYKKNKKNVPVKKCDYDTFSKNIKSTLDKICDKEDPLYIELIDKIEKGGFLLKQIVSTNSVIPHQVHELELDKILENLEKNYPSFKEISDGVSKIDKIKMIFNFRIPYYVGPLNDYHKDKVNSNTWIVKNEGFENENIRPWNFSKIVDEHACEEEFIKRMINECSYIPGEKVLPKSSLLYSEYMVLNELNNLRVNGDKLNPKIKKEIVENIYKKERKVTLKKIRNFLIINNYVDSKVEFSGLSDGIKANMSSYIDFAEILDDNFDNNMVEDLIEQITIHVGNVKLLTEKISNKYPNLEKKQINKIVNLKFKDWARFSRKLLVGIEGTEKETGEINTIIGFLRETNENFMELMSNRYTFSEEISEIKKKYIPNKLSKQIVDDLYVSPAVKKMIWQVLNINDELIKVLGKQPKKIFIEMARGKEEKPEVKDSRKNKLIELYKNLGKEGKEWLNRIEDKTEADFRNRALYLYYTQMGRCMYTGEIIDIERLYDKELYDLDHIIPRKMKKDDSIHKNLVLVTRNSNQYEKKDNYPVPEVIKSRENVRHLWYALKKKGLITEEKYNRLTRINPLSDKELSEFIERQLVETRQTTKVVKDLFENYYTDSKIVTVKAGLVSELRRDFEVLKCREINDLNHAHDAFLNIIVGDVWSKKFTSNPYNFVKKNREKYTLNNIFTKNQKDLRGNEIWNCAEGKKRIIKTLNKPSVLFSVENFEQTGQLFDQNIIGKQDYKEKTSYVPIKGDERLQDISKYGGYRGISGAYFFIVEHTEKNKRVKTIESLPIYMKSYVEENGLLDFCTNEMKLVDPKIIVKKLNYKSEIIVDGFKYLISGKTENRLSLETNEYLYWNHTQTTDIKKILNINEKIELEKYNGDIESERENIIKYIQIILEKFKLKPFIKRRNLPNIEINFADYETEKLLQLLVNLIPLTTKYVSPVDLTVISGSKYAGKVLIPKKISNLNEVIFISKSITGIYESRRRII

SEQ ID NO: 458 - protein, 1023 aa, Helicobacter cinaedi
MKIYSFDIGVASIGWAFIENEVLQDCGIRIFTKAENPKNGASLALPRREARGVRKRLARRRGRLNTIKQLLCKEFGLQLEDYLSNDGELPKAYTASKANPLKSPYELRTLALSQKLDSKDLVRVILHIAKHRGYGNKHAKDSKDTESGKVKKAIEFNRKTLAEKGYRSVGEYLYREFFQQSRISQNNGATEFINVRNKAGNYEHCVAQDMLKEELESILNAQRQFGFSLKQDFENKLLTKIFEQRPLKSFADKVGNCCFIAGEKRTPKDSLSAIEFIALSRTINTLINLSKESGEIYNRAIILQIVESTLKKGEISYKELREIIRLDERLRFKDPRLDYSREIKEAEKVKFLEFKQLKGFKKALGESFTTLARSQLDEIAEHIALIKDRVKLNEKLESYALTKEQREALSNLSFSAHINLSLQALKQILPFMRGDNGEQCLDYDESVEKAGLKALSKDTLKGQMLPPLNEFEPYLSNPVVARALAEYRKVLNALLKQYGSPHKIHIEYAREAKLSSTERQKYEKEQKDNYAANQAAHKKCQELGLEPSSTNLLKLKLWQEQGGLCLYSGAKITISYLQDPTALQVDHIYPYSRSFDDSYMNKCLVLTKANQEKGNRTPFEAFGTDSAKWGVITTLAQKLPHKKRRRILNTAFNDKEAGFKLRNLNDTSYIARLVADYTETYLEFLPLVESENTTLGKGQKGSKKHIAIVNGALTSTMRYYLGFASKDRDNHLHHALDAVIIGFMNDSVIKAFSDFKKTQETSKAAYYAHTLSKQEYKKQRAFIQLPSGENFRASVLEKVESVFVSKPPRKRVRGALHEATFYSPNDPKLLKNYGGTKGVERALALGKMRKVGAKIVSNGAMVRVDIFRHKSSGKFYGVPVYTMDFALGILPNKAVVVGKDKNGVIKDWLEMDSSYEFIFSLYKDDLLLVQKKEMAEPELCYFMSFNSSIAQISVAKHDNNFSTLTKNQKLLFSNATQEDVSGKSIGIQNLQVFEKWQVSVLGEVKRTQSYPRENISLASKAKK

SEQ ID NO: 459 - protein, 1023 aa, Helicobacter cinaedi
MKIYSFDIGVASIGWAFIENEVLQDCGIRIFTKAENPKNGASLALPRREARGVRKRLARRRGRLNTIKQLLCKEFGLQLEDYLSNDGELPKAYTASKANPLKSPYELRTLALSQKLDSKDLVRVILHIAKHRGYGNKHAKDSKDTESGKVKKAIEFNRKTLAEKGYRSVGEYLYREFFQQSRISQNNGATEFINVRNKAGNYEHCVAQDMLKEELESILNAQRQFGFSLKQDFESKLLTKIFEQRPLKSFADKVGNCCFIAGEKRAPKDSPSAIEFIALSRTINTLINLSKESGEIYNRAIILQIVESTLKKGEISYKELREIIRLDERLRFKDPRLDYSREIKEAEKVKFLEFKQLKGFKKALGESFTTLAISQLDEIAEHIALIKDRVKLNEKLESYALTKEQREALSNLSFSAHINLSLQALKQILPFMRGDNGEQCLDYDESVEKAGLKALSKDTLKGQMLPPLNEFEPYLSNPVVARALAEYRKVLNVLLKQYGSPHKIHIEYAREAKLSSTERQKYEKEQKDNYAANQAAHKKCQELGLEPSSTNLLKLKLWQEQGGLCLYSGAKITISYLQDPTALQVDHIYPYSRSFDDSYMNKCLVLTKANQEKGNRTPFEAFGTDSAKWGVITTLAQKLPHKKRRRILNTAFNDKEAGFKLRNLNDTSYIARLVADYTETYLEFLPLVESENTTLSKGQKGSKKHIAIVNGVLTSTMRYYLGFASKDRDNHLHHALDAVIIGFMNDSVIKAFSDFKKTQETSKAAYYAHTLSKQEYKKQRAFIQLPSGENFRVSVLEKVESVFVSKPPRKRVRGALHEATFYSPNDPKLLKNYGGTKGVERALALGKMRKVGAKIVSNGAMVRVDIFRHKSSGKFYGVPVYTMDFALGILPNKAVVVGKDQNGVIKDWLEMDSSYEFIFSLYKDDVILVQKKEMQRPELCYFVSFDTSGASIKVAKHDNNFSTLTENQKLLFSNATKEEVVGKSIGIQNLKVFEKWQVSVLGEVKRTQSYPRENISLASKAKK

SEQ ID NO: 460 - protein, 344 aa, Helicobacter pullorum
MKILGFDIGIASIGWAFVENGELKDCGVRIFTKAENPKTGDSLAMPRREARSVRRRLARRKGRLETLKRLLAKEWDLCYEDYIAADGELPKAFMGKNLTNPYVLRYEALQRLLSKEELVRVVLHIAKHRGYGNKNAKITKSEESKREQGKILSALATNASVIARYRTVGEYFYKEFCEVIKNPQGLNTNENCTQPKVRVLKPIRNKGGEYTNCILQEDLQRELRCIFEHQKGFGFSITQEFQDKILKIAFYQRSLKDFSHLVGKCTFYPDEPRAPKFSLSAIEFITKAKAINLLASIAKESGEVWDKEQWRERLDSVFSAVCERGINTIPSSSHFLNIFDILYL

SEQ ID NO: 461 - protein, 1688 aa, Ignavibacterium album
MEFKKVLGLDIGTNSIGCALLSLPKSIQDYGKGGRLEWLTSRVIPLDADYMKAFIDGKNGLPQVITPAGKRRQKRGSRRLKHRYKLRRSRLIRVFKTLNWLPEDFPLDNPKRIKETISTEGKFSFRISDYVPISDESYREFYREFGYPENEIEQVIEEINFRRKTKGKNKNPMIKLLPEDWVVYYLRKKALIKPTTKEELIRIIYLFNQRRGFKSSRKDLTETAILDYDEFAKRLAEKEKYSAENYETKFVSITKVKEVVELKTDGRKGKKRFKVILEDSRIEPYEIERKEKPDWEGKEYTFLVTQKLEKGKFKQNKPDLPKEEDWALCTTALDNRMGSKHPGEFFFDELLKAFKEKRGYKIRQYPVNRWRYKKELEFIWTKQCQLNPELNNLNINKEILRKLATVLYPSQSKFFGPKIKEFENSDVLHIISEDIIYYQRDLKSQKSLISECRYEKRKGIDGEIYGLKCIPKSSPLYQEFRIWQDIHNIKVIRKESEVNGKKKINIDETQLYINENIKEKLFELFNSKDSLSEKDILELISLNIINSGIKISKKEEETTHRINLFANRKELKGNETKSRYRKVFKKLGFDGEYILNHPSKLNRLWHSDYSNDYADKEKTEKSILSSLGWKNRNGKWEKSKNYDVFNLPLEVAKAIANLPPLKKEYGSYSALAIRKMLVVMRDGKYWQHPDQIAKDQENTSLMLFDKNLIQLTNNQRKVLNKYLLTLAEVQKRSTLIKQKLNEIEHNPYKLELVSDQDLEKQVLKSFLEKKNESDYLKGLKTYQAGYLIYGKHSEKDVPIVNSPDELGEYIRKKLPNNSLRNPIVEQVIRETIFIVRDVWKSFGIIDEIHIELGRELKNNSEERKKTSESQEKNFQEKERARKLLKELLNSSNFEHYDENGNKIFSSFTVNPNPDSPLDIEKFRIWKNQSGLTDEELNKKLKDEKIPTEIEVKKYILWLTQKCRSPYTGKIIPLSKLFDSNVYEIEHIIPRSKMKNDSTNNLVICELGVNKAKGDRLAANFISESNGKCKFGEVEYTLLKYGDYLQYCKDTFKYQKAKYKNLLATEPPEDFIERQINDTRYIGRKLAELLTPVVKDSKNIIFTIGSITSELKITWGLNGVWKDILRPRFKRLESIINKKLIFQDEDDPNKYHFDLSINPQLDKEGLKRLDHRHHALDATIIAATTREHVRYLNSLNAADNDEEKREYFLSLCNHKIRDFKLPWENFTSEVKSKLLSCVVSYKESKPILSDPFNKYLKWEYKNGKWQKVFAIQIKNDRWKAVRRSMFKEPIGTVWIKKIKEVSLKEAIKIQAIWEEVKNDPVRKKKEKYIYDDYAQKVIAKIVQELGLSSSMRKQDDEKLNKFINEAKVSAGVNKNLNTTNKTIYNLEGRFYEKIKVAEYVLYKAKRMPLNKKEYIEKLSLQKMFNDLPNFILEKSILDNYPEILKELESDNKYIIEPHKKNNPVNRLLLEHILEYHNNPKEAFSTEGLEKLNKKAINKIGKPIKYITRLDGDINEEEIFRGAVFETDKGSNVYFVMYENNQTKDREFLKPNPSISVLKAIEHKNKIDFFAPNRLGFSRIILSPGDLVYVPTNDQYVLIKDNSSNETIINWDDNEFISNRIYQVKKFTGNSCYFLKNDIASLILSYSASNGVGEFGSQNISEYSVDDPPIRIKDVCIKIRVDRLGNVRPL

SEQ ID NO: 462 - protein, 1354 aa, Indibacter alkaliphilus
MKKILGLDLGTTSIGWAFIKEPEKDVVGSEIVDMGVRIVPLSSDEENDFAKGNTISINADRTLKRGARRNLQRFKQRRNALLETFKEKNLIPSNFQYAEDGPSSTFSTLKLRDKAAKEKIELDDFVKVLLQINKKRGYKSSRKAMSEEDEGTAIDSMGIAKELYENDLTPGQWVYEALKNGRKNVPDFYRSDLQEEFKKIVNYQSEFYPDILNTSFVEDWMGKASTPTKQYFNKRGVQLAENKGKREERRLQEYKWRAEAVNFKIDLSEIALILSQINSQISNSSGYLGAISDRSKELYFKNLTVGQYLYQQVKKNPHTRLKGQVFYRQDYLDEFEKIWSVQSSFYPQLNDELKQEVRDVTIFFQRRLKSQKHLISNCEFEEHHKVVPKSHPIFQEFRIWQNLNNLTLIKKDNLNEKCELALEDKTALANELAFKKELSVKDALKVLGLKPSDWEFNFTKIEGNRTNHAFFEAFAKIIELEDGEPIDLGNLKADDILDQFSEAFLRIGIDTELLQVNSDIEGAEYEKQSYIQFWHLLYSSEDDQKLKQNLIRKFGFKPEHAKILASISLQDDHASLSSRAIKKILPHLQSGLIYDKACTYAGYNHSSSFTKDENEKRELRAELELLKKNSLRNPVVEKILNQMINVVNAILKDPNLGRPDEIRVEMARELKANAEQRKNMTSNIASATRDHEKYREILKKEFGLKRVTKNDLLRYKLWLETDGISLYTGKPIEASKLFSKEYDIEHIIPKARLFDDSFSNKTICERQLNIDKANVTAFSFLQNKLSADEFEQYQSRVKSLYGKLSKAKIQKLLMANDKIPEDFIARQLQETRYISKKAKEILFEITMRVSVTTGTITDKLREDWGLVEIMKELNWEKYDKLGLTYTIEGKHGERLNKIKDWNKRNDHRHHAMDALTVALTKPAYIQYLNNLNAKAIGNKKGTEIFAIEQKYLKRENGKLCFIPPIENIRAEAKKHLSKILVSYKAKNKVVTINKNKTKKKAGFNEQTALTPRGQLHKETVYGKSFHYSTKFEKIGASFDAQKINTVAKKEEREALLKRLAENGNDPKKAFTGKNSLNKMPIYLDLGKNIKLSEKVKTVVLEQNYTIRKNIDPDLKVDKVIDVGIKRILESRLEEFGGNAKLAFSNLEENPIWLNKEKGIPIKRVKISGVSNVESLHVKKDHFGEKILDEEGNEIPVDFVSTGNNHHVAIYEDEDGNLQDEVVNFYEAVIRRNQGESIIKYRHEEGWNFLYSIKQNEFFVFPSQDFNPNDFDLLDPKNYDLISPNLYRAQKFSKVMYGNSAVRDYVFRHHLETVLNDVKELKDVAYKQLKSLQYLNGIKKVRLNHLGQIIQVGEY

SEQ ID NO: 463 - protein, 1397 aa, Joostella marina
MKKVLGLDLGTNSIGWALVNEATKEEKKEGKSSEIIKLGVRVNPLTVDEKTNFEKGRPLSTNADRTLKRSARRNLQRYKLRRRNLIEILIKNGFITKDTPLTETGKDTTHQTLKLRAKSAKEKVDLKDFAKILLTINKKRGYKSSRKVNSDEDGLAIDGMAVAKHLYEQNLTPGQYVLNLLQKNKKYVPDFYRSDLQEEFKNIWNNQKTYYFDILTDTLFEELKDKNKSQTWAICKKPFDIAGIKQIGKASDKRLERYKWRTEGLTQKLNLEYLAIALQEINNDINKSSGYLGAISDRSKELFFNKETVGENLYRQLVKTPHTSLRNQVFYRQDYLDEFETIWETQAKFYPQLTHTLKEEIRDVIIFYQRKLKSQKSLISFCQFESWEQTYIEKETGKSKTRTVGRKVIPKSSPLFQEFKIWQNLNSLEFRNSDEGEIIEFIKLDEDIRQTVFEELNLRGNLKPNDVLKILGNYISLGKVSQWKCNFEEIEGNRTNAALYNVYQIIAENEGYGFDWAKKTASEINKELKNIFPQLGIDASILDFDFTQANFDKQTSYQLWHLLYSAEEDFKISEEDKVLYGNSSVSLKKKLHQKYGFKPEYTKLLTNISLQPDYGNLSAKAICNILPYLKENNVYSEACDLTGYNHSNFLTAEEQAKRPLKPILELLKKNSLRNPVVEKILNQMVNVVNQVIETYGKPDEIRIELTRELKKSAKERANMTKSIADATRRNDDYRKTIIKEFGIPNPTKSDVVRYRLWQELASRGYKDIFTDTEIKPQELFSNKIDIEHIIPKALLFDDSFSNKTLAFKKDNLKKANRTAYDFIANDYAPNLENYIERVESLHKDRKITRAKRNKLLMLQSKLPDGFIERDLRNSQYITKEAKKMLYEVCRTVVSTSGSITDKLREDWDLINVMKELNFPKYKALGLTEKIERYDIGAEKMKEVEIIEDWNKRNDHRHHAIDALTVAFSTHSHIQYLNHLNARRDEGHKKHAAIIAIESTITEKEGNKKRRFIAPLPNFRLQAKEHIESILVSFKNKNKVVTNNINKTKRIKKDKFNTKVQLTPRGQLHKETIYGKIKQPLEKHIKLNKSFTLEQAKLIIDKRQREKVLNHLEKYAHNSDIAFNSKTLKKNPLLISDEPLKEVLCFEEVFTIRKDISYDNFKNEKQLDKVIDEKVKQALKERINQYNGDFREAFSDIERNPIWLNKAKGICVKRATIKGVSNAEPLHTAKNHLGEEVLTENKEQIPVDYVSTGNNHHVAIYEDEDGNLQEKVVSFYEAVIRVNEGLPIIDKEYNKSLGWTFKFTMKQNEMFVFPSEDFNPTEIDLLDQKNASLISPNLFRVQKFTIKDYFFRHHLETTVENNNTLKNTTWRREGLSGIYGIIKIRLNHLGEIVQVGEY

SEQ ID NO: 464 - protein, 1060 aa, Kingella kingae
MAAKSLNYILGLDLGIASCGWAVVEMDEQENPLRLIDVGVRTFEEAENPKDGSSLAETRRLARAQRRLISRRANRMNKLCRLLKQENVLQANDYDEKGLIIGLPNQAWELRAQGLDRKLEPKEWAAVLIHLVKHRGYLSQRKNESQTADKELGALLSGMNHNHQLLQSQSNQYRTPAELAIKQFATQDGHIRNQRGAYTHTFNRLDLQNELNQLFDAQTRLGNPHVSGSLKTAINDLLMNQKAALSGDAILEMLGRCTFEPSEYKAAKNTYSAERFVWLGKLTNLRIQDNGLESALSREQRELLLNEPYNKTKLTYQQVRKLLRLPETAFFKGLRYGKDNAESATFMEMKSYHAIRKSLENKSLKSEWEKLKTQPKLLDLIGTAFSIYKTDDEIAGCLKNQLPENVIIALQGQLNFSNFMELSLKALEKLLPLMEQGLRYDEACTQIYGNRHEKIADKTEKFLPNIPADKLRNPVVLRTLTQARKVINAIIRRYGSPARVHIETGREVGKSFSDRDKLKKQQEENQEQRRRAIDEWKQFFPNAAHEPKAVDILKLRLYQLQQGKCLYSGLPIDVRRLPEKGYVEIDHALPFSRTWDDSFNNKILVLASENQNKGNQTPYEYLRGADNSESWRLFVENVQNCQFSPNKKQKIMAKQLDEKGFLERNLNDTRYVSRFLCQFISEHLHLTGKGKKRVFASNGQITALLRGRWGLSKNREENDRHHAVDAVVVACSTVAMQQKITQFVRYQKGNVFTGERIDKETGEVISIHFPTPWEHFREEVMIRVFDDNPLRTLPEKLPNRPEALHEYVMPLFVSRMPTRKMTGQGHKETIKSAKRLDEKISVLRVPLTQLKLNDLENMVNREREPALYEALKARLEQFKNDPAKAFAEPFFKQGGQQVKAVRVEIVQKSGMLLRKINGVADNGSMVRVDVFEKSGKFYLVPIYAWQVAEGILPNYAVVAHKDESDWILMDESYHFKFALYKNDLLEVQTKKGGIMGYFASLDRATGAITIREHDRDKKKCKDGEHRSIGVKMASSFKKLQVDELGKNIHETRSRKRPNIG

SEQ ID NO: 465 - protein, 1314 aa, Lactobacillus animalis
MLKKDYSIGLDIGTNSVGHAVVTDDYKVPTKKMKVFGDTSKKTIKKNMLGVLLFNEGQTAADTRLKRGTRRRYTRRKNRLRYLQEIFAPELAKVDPNFLYRLEESSLVAEDKKYDVYPIFGKREEELLYHDTYKTIYHLRSALANNDQPADLRLVYLALAHIIKYRGNFLLEGEIDLRTTDINKVFAEFSETLNENSDENLGKLDVADIFKNNTFSKTKKSEELLKLSGAKKNQLAHQLFKMMVGNMGSFKKVLGTDEEHKLSFGKDTYEDDLNDLLAEAGDQYLDIFVAAKKVYDAAILASILDVKDTQTKTVFSQAMIERYEEHQKDLIELKRVFKKYLPEKCHDFFSEPKISGYAGYIDGKVSEEDFYKYTKKTLKGIPETEEILQKIDANNYLRKQRTFDNGAIPHQVHLKELVAIVENQGKYYPFLRENKDKFEKILNFRIPYYVGPLARGNSKFAWLTRAGEGKITPYNFDEMIDKETSAEDFIKHMTINDLYLPTEPVLPKHSLLYERYTIFNELAGVRYVTENGEAKYFDAQTKRSIFELFKLDRKVSEKMVIKHLKVVMPAIRIQALKGLDNGKFNASYGTYKDLVDMGVAPELLNDEVNSEKWEDIIKTLTIFEGRKLIKRRLENYRDFLGEDILRKLSRKKYTGWGRLSAKLLDGIYDKKTHKTILDCLMTEDYSQNFMQLINDDNYSFKETIKNAQVIEKEETLAKTVQELPGSPAIKKGILQSLEIVDEIIKVMGYKPKSIVVEMARETQKTHGTRKREDRVQQIVENLKDANELPEKLPSNAELSDERKYLYCLQNGRDMYTGAPLDYDHLQFYDVDHIIPQSFLKDDSIENKVLTIKKENVRKTNGLPSEAVIQKMGSFWKKLLDAGAMTNKKYDNLRRNLHGGLNEKLKERFIERQLVETRQITKYVAQLLDQRLNYDGNGVELDEKIAIVTLKAQLASQFRSEFKLRKVRALNNLHHAHDAYLNAIVANLIMAKYPELEPEFVYGKYRKAKFKGLGKATAKNTLYANVLYFLKENEVYPFWDKARDLPTIKRYLYRAQVNKVRKAERQIGGFSDEMLVPKSDSGKLLPRKEGLDPVKYGGYAKAVESYAVLITADEVKKGKTKKVKTLVNIPIIDSKKYEADPTAYLASRGYTNVTNSFILPKYSLLEDPEGRRRYLASFKEFQKANELILPQHLVELLYWVNAKDGEQKLEDHKAEFKELFDKIMEFADKYVVAPKNSEKIRRLYEENQDATPMELGKNFVELLRYTADGAASDFKFFGENIPRKRYNSAGSLLNGTLIYQSKTGLYETRIDLGKL

SEQ ID NO: 466 - protein, 1371 aa, Lactobacillus buchneri
MKVNNYHIGLDIGTSSIGWVAIGKDGKPLRVKGKTAIGARLFQEGNPAADRRMFRTTRRRLSRRKWRLKLLEEIFDPYITPVDSTFFARLKQSNLSPKDSRKEFKGSMLFPDLTDMQYHKNYPTIYHLRHALMTQDKKFDIRMVYLAIHHIVKYRGNFLNSTPVDSFKASKVDFVDQFKKLNELYAAINPEESFKINLANSEDIGHQFLDPSIRKFDKKKQIPKIVPVMMNDKVTDRLNGKIASEIIHAILGYKAKLDVVLQCTPVDSKPWALKFDDEDIDAKLEKILPEMDENQQSIVAILQNLYSQVTLNQIVPNGMSLSESMIEKYNDHHDHLKLYKKLIDQLADPKKKAVLKKAYSQYVGDDGKVIEQAEFWSSVKKNLDDSELSKQIMDLIDAEKFMPKQRTSQNGVIPHQLHQRELDEIIEHQSKYYPWLVEINPNKHDLHLAKYKIEQLVAFRVPYYVGPMITPKDQAESAETVFSWMERKGTETGQITPWNFDEKVDRKASANRFIKRMTTKDTYLIGEDVLPDESLLYEKFKVLNELNMVRVNGKLLKVADKQAIFQDLFENYKHVSVKKLQNYIKAKTGLPSDPEISGLSDPEHFNNSLGTYNDFKKLFGSKVDEPDLQDDFEKIVEWSTVFEDKKILREKLNEITWLSDQQKDVLESSRYQGWGRLSKKLLTGIVNDQGERIIDKLWNTNKNFMQIQSDDDFAKRIHEANADQMQAVDVEDVLADAYTSPQNKKAIRQVVKVVDDIQKAMGGVAPKYISIEFTRSEDRNPRRTISRQRQLENTLKDTAKSLAKSINPELLSELDNAAKSKKGLTDRLYLYFTQLGKDIYTGEPINIDELNKYDIDHILPQAFIKDNSLDNRVLVLTAVNNGKSDNVPLRMFGAKMGHFWKQLAEAGLISKRKLKNLQTDPDTISKYAMHGFIRRQLVETSQVIKLVANILGDKYRNDDTKIIEITARMNHQMRDEFGFIKNREINDYHHAFDAYLTAFLGRYLYHRYIKLRPYFVYGDFKKFREDKVTMRNFNFLHDLTDDTQEKIADAETGEVIWDRENSIQQLKDVYHYKFMLISHEVYTLRGAMFNQTVYPASDAGKRKLIPVKADRPVNVYGGYSGSADAYMAIVRIHNKKGDKYRVVGVPMRALDRLDAAKNVSDADFDRALKDVLAPQLTKTKKSRKTGEITQVIEDFEIVLGKVMYRQLMIDGDKKFMLGSSTYQYNAKQLVLSDQSVKTLASKGRLDPLQESMDYNNVYTEILDKVNQYFSLYDMNKFRHKLNLGFSKFISFPNHNVLDGNTKVSSGKREILQEILNGLHANPTFGNLKDVGITTPFGQLQQPNGILLSDETKIRYQSPTGLFERTVSLKDL

SEQ ID NO: 467 - protein, 315 aa, Lactobacillus casei
MFKDYLKQLEDDGTAKAIRQLYDRYIDGDDAKPFVREDFVKALTKEVTAHPNAKSPELLERLAQPDFMLKQRNKANGAIPVQMQQRELDQIIKNQSVYYDWLAAPNPVEKHRKSMPYQLDELLNFRIPYYVGPLVTAKEQKAARGGVFAWMVRKDPDGNITPYNFDEKVDREASANTFIQRMKTTDTYLIGEDVLPKQSLLYQSYEVLNELNNVRVNDNKLSFDQKQQVLGELFERHNTVTIKQFVDNLLAHGDYDRIPEVRGLADEKRFLSSLSTYNQLKGILHEAIDDSDKQTDMVDCKINPNAVRTKKISFL

SEQ ID NO: 468 - protein, 236 aa, Lactobacillus casei
MFKDYLKQLEDDGTAKAIRQLYDRYIDGDDAKPFVREDFVKALTKEVTAHPNAKSPELLERLAQPDFMLKQRNKANGAIPVQMQQRELDQIIKNQSVYYDWLAAPNPVEKHRKSMPYQLDELLNFRIPYYVGPLVTAKEQKAARGGVFAWMVRKDPDGNITPYNFDEKVDREASANTFIQRMKTTDTYLIGEDVLPKQSLLYQSYEVLNELNNVRVNDNKLSSSIFKSSATMITNS

SEQ ID NO: 469 - protein, 1389 aa, Lactobacillus casei
MIIRTYELKTITTIAILKMFQLLTGGLSMTKLGKPYGIGVDIGSNSIGFAAVDENSHLIRLKGKTVIGARLFEEGKAAADRRASRTTRRRLSRNRWRLSFLRDFFESHITPTGPNFFMRQKYSEISPKDKARYKYEKRLFNDRTDAEFYQQYPTMYHLRNRLLTDPSKADVREIYFAIHHILKSRGHFLTSGYAKDFNTNKVALNEIFPALQDAYAQVYPDLDITFDENKVNEFKTVLLNEKATPSDTQRALVNLLLAEDGDKDILKQQKQVLTEFAKAVVGLKTKLNVALGTEVDSSEATVWNFSLGQLDDKWAGIESAMTDEGTEILDQIRDLYRARLLNGIVPAGKTLSQAKVDDYAQHHEDLELFKDYLKQLEDDGTAKAIRQLYDRYIDGDDAKPFVREDFVKALTKEVTAHPNAKSPELLERLAQPDFMLKQRNKANGAIPVQMQQRELDQIIKNQSVYYDWLAAPNPVEKHRKSMPYQLDELLNFRIPYYVGPLVTAKEQKAAQGGVFAWMVRKDPDGNITPYNFDEKVDREASANTFIQRMKTTDTYLIGEDVLPKQSLLYQRYEVLNELNNVRVNNEKLSIEQKQQVIRELFERHNSVTIKQFAENLRAHGDYAHIPEIRGLADEKRFLSSLSTYRQLKSLLPDAIDDPAKQADIENIIAWSTVFEDAAIFKTKLKEINWLDSQTITKLSNIRYRGWGQFSHKFLNGLTLGNGHTIIQELFLSNNNLMQILTDETLQKKMTELNADKLKAANINDAIDDAYTSPSNKKALRQVLRVIEDIKRAADGQDPSWLYVETADGGGTPGKRTRARQHQLQEIYANAAHELIDSAVRGELEDKIADKADFNDRLVLYFMQGGRDIYTGTPLNIDQLSSYDIDHILPQSLIKDNSLDNRVLVHAIINREKNATFASTIYAQKMNATWRQWHEAGLISGRKLRNLQMRPDQIDKYASGFVARQLVETRQIIKLTEQIVAAQYPETKIIAVKAGLSHQLREELEFPKNRDVNHYHHAFDAFLAARIGTYLLKRFPNLQAFFTYGKFKKADVKKLRGFNFIRDITHAEDKIVVKDTGEVIWDKKRDVDELDRIYNFKRMLITHEVHFEKADLFKQTVYGAKDSKEAGGKKQLISKKKGYPVDIYGGYTQETGSYLSVVRLTKKAMYAVVKVSTRDAAKLAVAKSISEQKENETLNDIIDEKLSKISKNGKITHELFEVVLPRVGQKTLFKNSKYNLFLVNSDTYMHNYQELWMPREYQKMWKDISLSKYGDAQTEDQLDQIFGFIVSQVNSYFNLYDINQFRKKLNDAADKFATLPMRDTDDMQGKIATIGQLLIGLQANAARSDLRNLDIKTPLGLLQIPNGISLDSDTSVVYQSPTGLLEREVHLSDL

SEQ ID NO: 470 - protein, 412 aa, Lactobacillus casei
MIKDNSLDNRVLVHPLVNREKDTIFASTRFAKQTNGMWRQWHAAGLISSRKLRNLQMRPDEIDKYASGFVARQLVETRQIIKLTEQIVADQYPDTKIIAVKAGLSSQLRKELDFPKNREVNHYHHAFDAFLAARIGTYLLKRYPNLEPFFTYGKFKKTEVKKLKSFNFIRDMTHAKDKIVAKETGEIVWDNASDINELDRIYNFKRMLITHEVRFETASLFKQTLYAAKNPKNRGGSRQLIPKKKGYLVDIYGGYTQETGSYLSVVRLTKKAMYAVVKVSTRDAAKLAVAKSISEQKENETLKKIIDGKLSKTSKKGKTTHQLFEIVLPRVGQKTLFKNSKYNQFLVNSDTYMHNYQELWMPREYQRMWKDILLSNHGDAQIEGQLDQIFKFIVSQVNSYFNLYDINQFRKK

SEQ ID NO: 471 - protein, 234 aa, Lactobacillus casei
MKVTKKTETIFKVVKIATSQVAALNKARSRSTAEELSVLTELLKPKFSKVGKNGKITDTPFEVVLPRVPREQLFYNAKYGFFMVNSDTMFHNFQEIWVSRSDQKILQQIRKAKIDYPNVDQDLDNLFHNLADQIVKYFDLYSIAGFKEKISQSQNTFNDLAVDDTDQSVGKITVINELLKGAQANGMTGSLKVLKISTPFGFTQDKSGVLTKDSSIIYQSPTGLFERSVRLTDL

SEQ ID NO: 472 - protein, 566 aa, Lactobacillus casei
MQILTDEVLKQKIAELNAHELKASGIYAAIDDAYTSPSNKKALRQVLSVIDDITNAAGQAPNWLYIETADGDGVPGKRTNSRQRKIQEIYVNAAQELITSSVRGELEDKIASRADFTDRLVLYFMQGGRDIYTGEPLNIDNLSSYDIDHILPQSLIKDNSLDNRVLVHPLVNREKDTIFASTRFAKQMNGMWRQWHAAGLISSRKLRNLQMRPDEIDKYASGFVARQLVETRQIIKLTEQIVADQYPDAKIIAVKAGLSSQLRKELDFPKNREVNHYHHAFDAFLAARIGTYLLKRYPNLEPFFTYGKFKKTEVKKLKSFNFIRDMTHAKDKIVAKETGEIVWDNASDINELDRIYNFKRMLITHEVRFETASLFKQTLYAAKNSKNRGGSRQLIPKKKGYLVDIYGGYTQETGSYLSVVRLTKKAMYAVVKVSTRDAAKLAVAKSISEQKENETLKKIIDGKLSKTSKKGKTTHQLFEIVLPRVGQKTLFKNSKYNQFLVNSDTYMHNYQELWMPREYQRMWKDILLSNHGDAQLEGQLDQIFKFIVSQVNSYFNLYDINQFRKK

SEQ ID NO: 473 - protein, 1363 aa, Lactobacillus casei
MTKLGKPYGIGVDIGSNSIGFAAVDENSHLIRLKGKTVIGARLFEEGKAAADRRASRTTRRRLSRNRWRLSFLRDFFESHITPTDPNFFMRQKYSEISPKDKARYKYEKRLFNDRTDAEFYQQYPTMYHLRNRLLTDPSKADVREIYFAIHHILKSRGHFLTSGYAKDFNTNKVALNEIFPALQDAYAQVYPDLDITFDENKVNEFKTVLLDEKATPSDTQRALVNLLLAEDGDKDILKQQKQVLTEFAKAVVGLKMKLNVALGTEVDSSEATAWNFSLGQLDDKWAGIESAMTDEGTEILDQIRDLYRARLLNGIVPAGKTLSQAKVDDYEQHHEDLELFKDYLKQLEDDGMAKVIRQLYDRYIDGDDAKPFVREDFVKALTKEVTAHPNAKSPELLERLVQPDFMLKQRNKANGAIPVQMQQRELDQIIKNQSVYYDWLAAPNPVEKHRQSMPYQLDELLNFRIPYYVGPLVTAKEQKAAQGGVFAWMVRKDPDGNITPYNFDEKVDREASANTFIQRMKTTDTYLIGEDVLPKQSLLYQSYEVLNELNNVRVNDNKLSFDQKQQVLGELFERHNTVTIKQFVDNLLAHGDYDRIPEVRGLADEKRFLSSLSTYNQLKGILHEAIDDSDKQTDIEKIIAWSTIFEDKAIFKTKLNEISWLTAGMINSLANIRYRGWGQFSHKLLNELTLSTGRTVFEELLISSHNLMQILTDEVLKQKIAELNAHELKASGIYAAIDDAYTSPSNKKALRQVLSVIDDITNAAGQAPNWLYIETADGDGVPGKRTNSRQRKIQEIYANAAQELITGSVRGELEDKIASRADFTDRLVLYFMQGGRDIYTGEPLNIDNLSSYDIDHILPQSLIKDNSLDNRVLVHPLVNREKDTIFASTRFAKQMNGMWRQWHAAGLISSRKLRNLQMRPDEIDKYASGFVARQLVETRQIIKLTEQIVADQYPDAKIIAVKAGLSSQLRKELDFPKNREVNHYHHAFDAFLAARIGTYLLKRYPNLEPFFTYGKFKKTEVKKLKSLKSFNFIRDMTHAKDKIVAKETGEIVWDNASDINELDRIYNFKRMLITHEVRFETASLFKQTLYAAKNSKNRGGSRQLIPKKKGYLVDIYGGYTQETGSYLSVVRLTKKAMYAVVKVSTRDAAKLAVAKSISEQKENETLKKIIDGKLSKTSKKGKTTHQLFEIVLPRVGQKTLFKNSKYNQFLVNSDTYMHNYQELWMPREYQRMWKDILLSNHGDAQLEGQLDQIFKFIVSQVNSYFNLYDINQFRKKIADATDKFAKLPTHDTDNARGKIATIGQLLIGLQANAMRSDLRNLDIKTPFGLLQIGTGITLDLDTSIIYQSPTGLFEREVPLTDL

SEQ ID NO: 474 - protein, 1360 aa, Lactobacillus casei
MTKLGKPYGIGVDIGSNSIGFAAVDENSHLIRLKGKTVIGARLFEEGKAAADRRASRTTRRRLSRNRWRLSFLRDFFESHITPTDPNFFMRQKYSEISPKDKARYKYEKRLFNDRTDAEFYQQYPTMYHLRTRLLTDPSKADVREIYFAIHHILKSRGHFLTPGYAKDFNTNKVALNEIFPALQDAYAQVYPDLDITFDENKVNEFKTVLLNEKATPSDTQRALVNLLLAEDGDKDILKQQKQVLTEFAKAVVGLKTKLNVALGTEVDSSEATVWNFSLGQLDDKWAGIESAMTDEGTEILDQIRDLYRARLLNGIVPAGKTLSQAKVDDYAQHHEDLELFKDYLKQLEDDGTAKAIRQLYDRYIDGDDAKPFVREDFVKALTKEVTAHPNAKSPELLERLAQPDFMLKQRNKANGAIPVQMQQRELDQIIKNQSVYYDWLAAPNPVEKHRKSMPYQLDELLNFRIPYYVGPLVTAKEQKAAQGGVFAWMVRKDPDGNITPYNFDEKVDREASANTFIQRMKTTDTYLIGEDVLPKQSLLYQSYEVLNELNNVRVNDNKLSFDQKQQVLGELFERHNTVTIKQFVDNLLAHGDYDRIPEVRGLADEKRFLSSLSTYNQLKGILHEAIDDADKQTDIENIIAWSTIFEDKAIFKTKLNEISWLNAGMINSLANIRYRGWGQFSHKLLNELTLSTGRTVFEELLISSRNLMQILTDEVLKQKIAELNAHELKASGIYAAIDDAYTSPSNKKALRQVLSVIDDITNAAGQAPNWLYIETADGDGVPGKRTNSRQRKIQEIYANAAQELITGSVRGELEDKIASRADFTDRLVLYFMQGGRDIYTGEPLNIDNLSSYDIDHILPQSLIKDNSLDNRVLVHPLVNREKDTIFASTRFAKQMNGMWRQWHAAGLISSRKLRNLQMRPDEIDKYASGFVARQLVETRQIIKLTEQIVADQYPDTKIIAVKAGLSSQLRKELDFPKNREVNHYHHAFDAFLAARIGTYLLKRYPNLEPFFTYGKFKKTEVKKLKSFNFIRDMTHAKDKIVAKETGEIVWDNASDINELDRIYNFKRMLITHEVRFETASLFKQTLYAAKNSKNRGGSRQLIPKKKGYLVDIYGGYTQETGSYLSVVRLTKKAMYAVVKVSTRDAAKLAVAKSISEQKENETLKKIIDGKLSKTSKKGKTTHQLFEIVLPRVGQKTLFKNSKYNQFLVNSDTYMHNYQELWMPREYQRMWKDILLSNHGDAQLEGQLDQIFKFIVSQVNSYFNLYDINQFRKKIADATDKFAKLPTHDTDNARGKIATIGQLLIGLQANAMRSDLRNLDIKTPFGLLQIGTGITLDLDTSIIYQSPTGLFEREVPLTDL

SEQ ID NO: 475 - protein, 700 aa, Lactobacillus casei
MTKLGKPYGIGVDIGSNSIGFAAVDENSHLIRLKGKTVIGARLFEEGKAAADRRASRTTRRRLSRNRWRLSFLRDFFESHITPTDPNFFMRQKYSEISPKDKARYKYEKRLFNDRTDAEFYQQYPTMYHLRTRLLTDPSKADVREIYFAIHHILKSRGHFLTSGYAKDFNTNKVALNEIFPALQDAYAQVYPDLDITFDENKVNEFKTVLLDEKATPSDTQRALVNLLLAEDGDKDILKQQKQVLTEFAKAVVGLKTKLNVALGTEVDSSEATAWNFSLGQLDDKWAGIESAMTDEGTEILDQIRDLYRARLLNGIVPAGKTLSQAKVDDYEQHHEDLELFKDYLKQLEDDGMAKAIRQLYDRYIDGDDAKPFVREDFVKALTKEVTAHPNAKSPELLERLVQPDFMLKQRNKANGAIPVQMQQRELDQIIKNQSVYYDWLAAPNPVEKHRQSMPYQLDELLNFRIPYYVGPLVTAKEQKAAQGGVFAWMVRKDPDGNITPYNFDEKVDREASANTFIQRMKTTDTYLIGEDVLPKQSLLYQSYEVLNELNNVRVNDNKLSFDQKQQVLGELFERHNTVTIKQFVDNLLAHGDYDRIPEVRGLADEKRFLSSLSTYNQLKGILHEAIDDSDKQTDIEKIIAWSTIFEDKAIFKTKLNEISWLNAGMINSLANIRYRGWGQFSHKLLNELTLSTGRTVFEA

SEQ ID NO: 476 - protein, 330 aa, Lactobacillus casei
MTKLGKPYGIGVDIGSNSIGFAAVDENSHLIRLKGKTVIGARLFEEGKAAADRRASRTTRRRLSRNRWRLSFLRDFFESHITPTDPNFFMRQKYSEISPKDKNRYKYEKRLFNDRTDAEFYQQYPTMYHLRNRLLTDPSKADVREIYFAIHHILKSRGHFLTPGDAKDFNTNKVALNEIFPALQDAYAQVYPDLDITFDENKMNEFKTVLLNEKATPSDTQRALVNLLLAEDGDKDILKQQKQVLTEFAKAVVGLKTKLNVALGTEVDSSEATAWNFSLGQLDDKWAGIESAMTDEGTEILDQIRDLYRARLLNGIVPAGKTLSQAKVDD

SEQ ID NO: 477 - protein, 330 aa, Lactobacillus casei
MTKLGKPYGIGVDIGSNSIGFAAVDENSHLIRLKGKTVIGARLFEEGKAAADRRASRTTRRRLSRNRWRLSFLRDFFESHITPTDPNFFMRQKYSEISPKDKNRYKYEKRLFNDRTDAEFYQQYPTMYHLRNRLLTDPSKADVREIYFAIHHILKSRGHFLTPGDAKDFNTNKVALNEIFPALQDAYAQVYPDLDITFDENKMNEFKTVLLNEKATPSDTQRALVNLLLAEDGDKDILKQQKQVLTEFAKAVVGLKTKLNVALGTEVDSSEATAWNFSLGQLDDKWAGIESAMTDEGTEILDQIRDLYRARLLNGIVPAGKTLSHAKVDD

SEQ ID NO: 478 - protein, 1361 aa, Lactobacillus casei
MTKLGKPYGIGVDIGSNSIGFAAVDENSHLIRLKGKTVIGARLFEEGKAAADRRASRTTRRRLSRNRWRLSFLRDFFESHITPTGPNFFMRQKYSEISPKDKARYKYEKRLFNDRTDAEFYQQYPTMYHLRNRLLTDPSKADVREIYFAIHHILKSRGHFLTSGYAKDFNTNKVALNEIFPALQDAYAQVYPDLDITFDENKVNEFKTVLLNEKATPSDTQRALVNLLLAEDGDKDILKQQKQVLTEFAKAVVGLKTKLNVALGTEVDSSEATVWNFSLGQLDDKWAGIESAMTDEGTEILDQIRDLYRARLLNGIVPAGNTLSQAKVDDYAQHHEDLELFKDYLKQLEDDGTAKAIRQLYDRYIDGDDAKPFVREDFVKALTKEVTAHPNAKSPELLERLAQPDFMLKQRNKANGAIPVQMQQRELDQIIKNQSVYYDWLAAPNPVEKHRKSMPYQLDELLNFRIPYYVGPLVTAKEQKAAQGGVFAWMVRKDPDGNITPYNFDEKVDREASANTFIQRMKTTDTYLIGEDVLPKQSLLYQRYEVLNELNNVRVNNEKLSIEQKQQVIRELFERHNSVTIKQFAENLRAHGDYAHIPEIRGLADEKRFLSSLSTYRQLKSLLPDAIDDPAKQADIENIIAWSTVFEDAAIFKTKLKEINWLDSQTITKLSNIRYRGWGQFSHKFLNGLTLGNGHTIIQELFLSNNNLMQILTDETLQKKMTELNADKLKAANINDAIDDAYTSPSNKKALRQVLRVIEDIKRAADGQDPSWLYVETADGGGTPGKRTRARQHQLQEIYANAAHELIDSAVRGELEDKIADKADFNDRLVLYFMQGGRDIYTGTPLNIDQLSSYDIDHILPQSLIKDNSLDNRVLVHAIINREKNATFASTIYAQKMNATWRQWHEAGLISGRKLRNLQMRPDQIDKYASGFVARQLVETRQIIKLTEQIVAAQYPETKIIAVKAGLSHQLREELEFPKNRDVNHYHHAFDAFLAARIGTYLLKRFPNLQAFFTYGKFKKADVKKLRGFNFIRDITHAEDKIVVKDTGEVIWDKKRDVDELDRIYNFKRMLITHEVHFEKADLFKQTVYGAKDSKEAGGKKQLISKKKGYPVDIYGGYTQETGSYLSVVRLTKKAMYAVVKVSTRDAAKLAVAKSISEQKENETLNDIIDEKLSKISKNGKITHELFEVVLPRVGQKTLFKNSKYNLFLVNSDTYMHNYQELWMPREYQKMWKDISLSKYGDAQTEDQLDQIFGFIVSQVNSYFNLYDINQFRKKLNDAADKFATLPMRDTDDMQGKIATIGQLLIGLQANAARSDLRNLDIKTPLGLLQIPNGISLDSDTSVVYQSPTGLLEREVHLSDL

SEQ ID NO: 479 - protein, 1128 aa, Lactobacillus casei
MTKLGKPYGIGVDIGSNSIGFAAVDENSHLIRLKGKTVIGARLFEEGKAAAKRRAGRTTRRRLSRNRWRLSFLRDFFESHITPTDPNFFMRQKYSEISPKDKARYKYEKRLFNDRTDAEFYQQYSTMYHLRNRLMTDPSRADVREIYFAIHHILKSRGHFLTPGDAKDFNTNDVALDEIFPALQDAYAQVYPDLGITFDEDKANEFKTILLNEIATSIDTQRALVKLLLAEEDDKDILKQQKQVLTEFAKAVVGLKTKLNLALGTEVDSSEATAWNFSLGQLDDKWAGIESAMTDEGTEILDQIRDLYRARLLNGIVPTGKTLSQAKVDDYTQHHEDLQLFKAYLKQLEDDGTAKAIRQLYDRYIDGDDAAPFLRENFVKALTKDVTAHPNTKSPELLERLAQPDFMLKQRNKANGAIPVQMQQRELDQIIKNQAVYYDWLAAPNPVEKHRKSMPYQLDELLNFRIPYYVGPLVTAKEQKAAQGGVFAWMVRKDPEGNITPYNFDEKVDREASANTFIQRMKTTDTYLIGEDVLPKQSLLYQRYEVLNELNNVRVNNEKLSIEQKQQVIRELFERHNSVTIKQFAENLRAHGDYAHIPEIRGLADEKRFLSSLSTYRQLKSLLPEAIDDPAKQADIENIIAWSTVFEDAAIFKTKLKEISWLGSEAITKLSNIRYRGWGQFSRKFLNGLTLGNGHTIIQELLLSTNNLMQILTDETLQKKMTELNADKLKTANINDAIDNAYTSPSNKKALRQVLRVVDDIKRAADGQDPSWLYVETADGGGTPGKRTRARQHQLQEIYANAAHELIDTAVRGELEDKISDKADFNDRLVLYFMQGGRDIYTGAPLNIDQLSSYDIDHILPQSLIKDNSLDNRVLVHAIINREKNATFASTIYAQKMNATWRQWHEAGLISGRKLRNLQMRPDQIDKYASGFVARQLVETRQIIKLTEQIVAAQYPDTKIIAVKAGLSHQLREELEFPKNRDVNHYHHAFDAFLAARIGTYLLKRFPNLQAFFTYGKFTKADVKKLRGFNFIRDITHAEDKIVAKDTGEVVWDKQRDVDELDRIYNFKRMLITHEVRFETADLFKQTVYGARDSKEAGGSKQLIPKKKDIQLIFMGAISERTRPILPL

SEQ ID NO: 480 - protein, 1366 aa, Lactobacillus casei
MTKLGKPYGIGVDIGSNSIGFAAVDENSHLIRLKGKTVIGARLFEEGKAAAYRRASRTTRRRLSRNRWRLSFLRDFFESHITPTDPNFFMRQKYSEISPKDKARYKYEKRLFNDRTDAEFYQQYPTMYHLRTRLLTDPSKADVREIYFAIHHILKSRGHFLTPGYAKDFNTNKVALNEIFPALQDAYAQVYPDLDITFDENKVNEFKTVLLNEKATPSDTQRALVNLLLAKEGDRDILKQQKQVLTEFAKAVVGLKTKLNVALGTEVDSSEATAWNFSLGQLDDKWAGIESAMTDEGTEILDQIRDLYRARLLNGIVPAGKTLSQAKVDDYAQHHEDLELFKDYLKQLEDDGTAKAIRQLYDRYIDGDDAKPFVREDFVKALTKEVTAHPNAKSPELLERLAQPDFMLKQRNKANGAIPVQMQQRELDQIIKNQAVYYDWLAAPNPVEKHRQSMTYQLDELLNFRIPYYVGPLVTAKEQKAAQGGVFAWMVRKDPDGNITPYNFDEKVDREASANTFIQRMKTTDTYLIGEDVLPKQSLLYQSYEVLNELNNVRVNDNKLSFDQKQQVLGELFERHNTVTIKQFVDNLLAHGDYDRIPEVRGLADEKRFLSSLSTYNQLKGILHEAIDDADKQTDIENIIAWSTIFEDKAIFKTKLNEISWLNAGMINSLANIRYRGWGQFSHKLLNELTLSTGRTVFEELLISSRNLMQILTDEVLKQKIAELNAHELKASGIYAAIDDAYTSPSNKKALRQVLSVIDDITNAAGQAPNWLYIETADGDGVPGKRTNSRQRKIQEIYANAAQELITGSVRGEFEDKIASRADFTDRLVLYFMQGGRDIYTGEPLNIDNLSSYDIDHILPQSLIKDNSLDNRVLVHPLVNREKDTIFASTRFAKQMNGMWRQWHAAGLISSRKLRNLQMRPDEIDKYASGFVARQLVETRQIIKLTEQIVADQYPDTKIIAVKAGLSSQLRKELDFPKNREVNHYHHAFDAFLAARIGTYLLKRYPNLEPFFTYGKFKKTEVKKLKSLKSLKSFNFIRDMTHAKDKIVAKETGEIVWDNASDINELDRIYNFKRMLITHEVRFETASLFKQTLYAAKNSKNRGGSRQLIPKKKGYLVDIYGGYTQETGSYLSVVRLTKKAMYAVVKVSTRDAAKLAVAKSISEQKENETLKKIIDGKLSKTSKKGKTTHQLFEIVLPRVGQKTLFKNSKYNQFLVNSDTYMHNYQELWMPREYQRMWKDILLSNHGDAQIEGQLDQIFKFIVSQVNSYFNLYDINQFRKKIADATDKFAKLPTHDTDNARGKIATIGQLLIGLQANAMRSDLRNLDIKTPFGLLQIGTGITLDLDTSIIYQSPTGLFEREVPLTDL

SEQ ID NO: 481 - protein, 1354 aa, Lactobacillus coryniformis
MTLHYNVGLDIGTNSVGYTIVDDNGKILQVKGKNGYGVRVFKEGATAAERRIFRTTHRRLKRRKWRLRLLQDFFEPYILPQDDGFFIRRKESNLVLNDRDEDTASLFNDRSDRDFYQAYPTIYHLRQALMTEKRQFDVREIYLAMHHIIKYRGHFLLNGTVNNFTNNKIDLHSDFEELNALLLNVIPELKFQIDLDHSTMFQTTLLNTTISRSGRQRDLVKSFYNGSDDKQLAKQQKSVATELLKAILGLKAKFHKLFNLDLLETTEWEFSFDAEDIDDKLAKLEPLMTENQQQVMDILQRIFAAITLNGIVPEGKTLSASKVDSYQKHKQDLKLLKAIAQHSDKKTATVLQTAYNEYINGIASKPLKQEDFYKRLTNAVKKSSDPQVADMLALIDQEKFLPKQRTKENGAIPHQLHQLELERIIDNQKDYYPWLAELNPNQARQKVAKYKLSELVAFRVPYYVGPLIEPEVQQATSNAHFAWMARKEAGPITPWNFDQKVDRNVSAERFIKRMTTKDTYLLAEDVLPLHSLLYQRFIVLNELNNVRVNGQKLTKKQKQAVYQDLFKRQPHVTKKQFKSYLVQTGEFAESSKIEGLANETSFNSGLTTENELRKIFGAQLDEARYQVDFEQIIEWATLFEDAKILRTKLAEITWLTTEQIEKLAGIRYRGWGRFSRKLLAGLRDQNGQQIIDLLWDTPNNFMVIVSQAAFSEAITKENEKLIDRRGAQDVITDLYTSPQNKKALRQVLAIVADVQKAMGGVPPQRIFIEFAREDEKNPRRSVERSRQLEKLYQTISNEFLINSEVRQELKEAVDQKVNFKDRLFLYFLQGGVDLYSGKRINIDQLSHYDIDHILPQSFIKDDSLDNRVLVSQKLNRSKSDSVPLSEFANYKFGPAMQAKWLQLKEAGLLSKRKYDNLTLDPTKLSKFAPLGFVNRQLVETRQVIKLAANLLASEETKVVTIKANMTHQVRKELDFPKNRNVNNYHHAFDAYLTAFVGIFLSKRYPKLKPYFTYGDFQKGNKLPDLKNFNFLYELKNKDRSIDSNTGEIIWDKQRDLAYMNKIYNFKKVTVVHEVLTKSGALYNQTLYKASEDKASGRGTKQLIRKKDNMPTELYGGYTGSTSAFMSIVRLWKKDKPYYKVVGIPTRMAAKLANQAQLLDYLTKKFTTRKLVKKTGDYKTTVERFELVVPKVGFNQLVIDGGQPFMLGSATYQYNARELFISKEAVKALNKQLSTHVDLVQVFDEILVQVNRWFPLYDTNGFREKLSHGRDRFMKLNDSFEEKSDTQIDVLNRILIGFHANAARTNLKILGLGTDLGFMTQQAGIRLTEKAILVHQSPSGLFERKVALRDLKGLR

SEQ ID NO: 482 - protein, 544 aa, Lactobacillus crispatus
KYYLYFMQLGRDAYTGKPINIDEVSQYYDIDHILPQSFIKDDSLNNRVLVAKPINNGKSDGVPLKLFGDNLATGLGITVKQMWNNWADKGLINKAKQNNLFLDPENINKHQASGFIRKQLVETSQIIKLATTILQAEYPKTKIIVVKASSNHYLRNEFDLYKSREVNDYHHAIDAYLTTICGNLLYQAYPKLRPFFVYGQFKKFSSDPKKENEILKKTKNFDFVAKLLGSKAPNEIRSQQGKVLFEKNKIRLQLNKAYNYKYMLVSRDTTTKNQEMFGMTIYPRAERDIAKSRKLIEKRKGFSTDIYGGYTGTAAAYMAIVRINKTKSSQYKVIAVPMTKRAILNKAEKEGNYEKILKQILSPSILYNDKGKRKAGVISFDIIKGKVPYNQVVQDGNKKFLLKSAIYLCNAKQLVLSEEAMRVITGHWLDSDKQDQELLDVYDEILEKIDRYLPLFDIRDFRNKLHKGREKFLKLNAEDKFKAIIQILKGLHDNSDTGELKDIGITVPFGQLQNNSGITLSSDTILVYQSPTGLFEKRVKISSL

SEQ ID NO: 483 - protein, 298 aa, Lactobacillus crispatus
MDELNKISVNGKKLSVSVKQELYEDLFKKNNTVSAKQLKNWLIENQKLPYIKIKGLADQTKFNSSLSTYIKLKKSGLFVDKLDSNEFRDDFEKIIEWSTIFEDKQIYIQKLQTIDWLTAKQIQFLQNIRLQGWGRLSKKLLTAIVDSNGQNIIEQLWNSQQIFMSIVNKADIKGTITDANQDLMHSNSMEDILSEAYTSPANKKMIRQVVKVVHDIQKAASGQAPKQIAIEFARESRRNSKLSQTRGHKLQDIYQKISGDIVNKNLKDKLAEYIKNNQLSVWEKTSFQMNKNDQDFLF

SEQ ID NO: 484 - protein, 279 aa, Lactobacillus crispatus
MNGKKLSVSVKQELYEDLFKKNNTVSAKQLKNWLIENQKLPYIKIKGLADQTKFNSSLSTYIKLKKSGLFVDKLDSNEFRDDFEKIIEWSTIFEDKQIYIQKLQTIDWLTAKQIQFLQNIRLQGWGRLSKKLLTAIVDSNGQNIIEQLWNSQQIFMSIVNKADIKGTITDANQDLMHSNSMEDILSEAYTSPANKKMIRQVVKVVHDIQKAASGQAPKQIAIEFARESRRNSKLSQTRGHKLQDIYQKISGDIVNKNLKDKLAEYIKNNQLNKDKYYTR

SEQ ID NO: 485 - protein, 538 aa, Lactobacillus crispatus
MQLGRDAYTGKPINIDEVSQYYDIDHILPQSFIKDDSLNNRVLVAKPINNGKSDGVPLKLFGDNLATGLGITVKQMWNNWADKGLINKAKQNNLFLDPENINKHQASGFIRKQLVETSQIIKLATTILQAEYPKTKIIVVKASSNHYLRNEFDLYKSREVNDYHHAIDAYLTTICGNLLYQAYPKLRPFFVYGQFKKFSSDPKKENEILKKTKNFDFVAKLLGSKAPNEIRSQQGKVLFEKNKIRLQLNKAYNYKYMLVSRDTTTKNQEMFGMTIYPRAERDIAKSRKLIEKRKGFSTDIYGGYTGTAAAYMAIVRINKTKSSQYKVIAVPMTKRAILNKAEKEGNYEKILKQILSPSILYNDKGKRKAGVISFDIIKGKVPYNQVVQDGNKKFLLKSAIYLCNAKQLVLSEEAMRVITGHWLDSDKQDQELLDVYDEILEKIDRYLPLFDIRDFRNKLHKGREKFLKLNAEDKFKAIIQILKGLHDNSDTGELKDIGITVPFGQLQNNSGITLSSDTILVYQSPTGLFEKRVKISSL

SEQ ID NO: 486 - protein, 206 aa, Lactobacillus crispatus
MQLGRDAYTGKPINIDEVSQYYDIDHILPQSFIKDDSLNNRVLVAKPINNGKSDGVPLKLFGDNLATGLGITVKQMWNNWADKGLINKAKQNNLFLDPENINKHQASGFIRKQLVETSQIIKLATTILQAEYPKTKIIVVKASSNHYLRNEFDLYKSREVNDYHHAIDAYLTTICGNLLYQAYPKLRPFFVYGQFKKFSSDPKKRK

SEQ ID NO: 487 - protein, 857 aa, Lactobacillus crispatus
MTKLNNEYMVGLDIGTNSCGWVATDFDNNILKMHGKRALGSHLFDEGVSAADRRAFRTTRRRIKRRKWRLKLLEEIFDEEMAKVDPNFFARLKESGLSPLDTRKNVSSIVFPTKKMDKQFYKKFPTIYHLRNALMKQDKKFDLRAIYIAIHHIVKYRGNFLSNSSISNFSASKIEIDRFVNELNDLYSIFLPESGVIFDAGNASKVEDIIRNEQMFKLDKIKEIADVLPDTENKSGLKLSKKISKEISKAILGYKAKFEIILQVNVDKTDSSIWNFKLNDENADVNLSEITSDLTDTQLQILDLVRNLFSAISLLNIVDEGSTLSESMIRKYNDHAQDLKLLKTVIKNHSDRKKAHNLQLAYDKYVNNRHFVDVETKKAFPNKHLYRKSDFYEIVKKNLDASKEAVQIRKEIALDKFMPKQRSDENGVIPFQLNQIELDKIIENQGKYYPFLKEINPIKAHRMQAPYKLDELIRFRVPYYVGPMIEPTNSSYPQTRQNQSFAWMVRKAKGRITPWNFDEKVDRQKSANNFIKRLTTKDTYLFGEDVLPANSLLYQKYTVLDELNKISVNGKKLSVSVKQELYEDLFKKNNTVSAKQLKNWLIENQKLPYIKIKGLADQTKFNSSLSTYIKLKKSGLFVDKLDSNEFRDDFEKIIEWSTIFEDKQIYIQKLQTIDWLTAKQIQFLQNIRLQGWGRLSKKLLTAIVDSNGQNIIEQLWNSQQIFMSIVNKADIKGTITDANQDLMHSNSMEDILSEAYTSPANKKMIRQVVKVVHDIQKAASGQAPKQIAIEFARESRRNSKLSQTRGHKLQDIYQKISGDIVNKNLKDKLAEYIKNNQLSVWEKTSFQMNKNDQDFLF

SEQ ID NO: 488 - protein, 857 aa, Lactobacillus crispatus
MTKLNNEYMVGLDIGTNSCGWVATDFDNNILKMHGKRALGSHLFDEGVSAADRRAFRTTRRRIKRRKWRLKLLEEIFDEEMAKVDPNFFARLKESGLSPLDTRKNVSSIVFPTKKMDKQFYKKFPTIYHLRNALMKQDKKFDLRAIYIAIHHIVKYRGNFLSNSSISNFSASKIEIDRFVNELNDLYSIFLPESGVIFDAGNASKVEDIIRNEQMFKLDKIKEIADVLPDTENKSGLKLSKKISKEISKAILGYKAKFEIILQVNVDKTDSSIWNFKLNDENADVNLSEITSDLTDTQLQILDLVRNLFSAISLLNIVDEGSTLSESMIRKYNDHAQDLKLLKTVIKNHSDRKKAHNLQLAYDKYVNNRHFVDVETKKAFPNKHLYRKSDFYEIVKKNLDASKEAVQIRKEIALDKFMPKQRSDENGVIPFQLNQIELDKIIENQGKYYPFLKEINPIKAHRMQAPYKLDELIRFRVPYYVGPMIEPTNSSYPQTRQNQSFAWMVRKAKGRITPWNFDEKVDRQKSANNFIKRLTTKDTYLFGEDVLPANSLLYQKYTVLDELNKISVNGKKLSVSVKQELYEDLFKKNNTVSAKQLKNWLIENQKLPYIKIKGLADQTKFNSSLSTYIKLKKSGLFVDKLDSNEFRDDFEKIIEWSTIFEDKQIYIQKLQTIDWLTAKQIQFLQNIRLQGWGRLSKKLLTAIVDSNGQNIIEQLWNSQQIFMSIVNKADIKGTITDANQDLMHSNSMEDILSEAYTSPANKKMIRQVVKVVHDIQKAASGQAPKQIAIEFARESRRNSKLSQTRGHKLQDIYQKISGDIVNKNLKDKLAEYIKNNQLSVWEKNSFQMNKNDQDFLF

SEQ ID NO: 489 - protein, 347 aa, Lactobacillus crispatus
MVNLKSLVLILKKENEILKKTKNFDFVAKLLGSKAPNEIRSQQGKVLFEKNKIRLQLNKAYNYKYMLVSRDTTTKNQEMFGMTIYPRAERDIAKSRKLIEKRKGFSTDIYGGYTGTAAAYMAIVRINKTKSSQYKVIAVPMTKRAILNKAEKEGNYEKILKQILSPSILYNDKGKRKAGVISFDIIKGKVPYNQVVQDGNKKFLLKSAIYLCNAKQLVLSEEAMRVITGHWLDSDKQDQELLDVYDEILEKIDRYLPLFDIRDFRNKLHKGREKFLKLNAEDKFKAIIQILKGLHDNSDTGELKDIGITVPFGQLQNNSGITLSSDTILVYQSPTGLFEKRVKISSL

SEQ ID NO: 490 - protein, 534 aa, Lactobacillus crispatus
RDAYTDKPINIDEVSQYYDIDHILPQSFIKDDSLNNRVLVAKPINNGKSDGVPLKLFGDNLATGLGITVKQMWNNWADKGLINKAKQNNLFLDPENINKHQASGFIRKQLVETSQIIKLATTILQAEYPKTKIIVVKASSNHYLRNEFDLYKSREVNDYHHAIDAYLTTICGNLLYQAYPKLRPFFVYGQFKKFSSDPKKENEILKKTKNFDFVAKLLGSKAPNEIRSQQGKVLFEKNKIRLQLNKAYNYKYMLVSRDTTTKNQEMFGMTIYPRAERDIAKSRKLIEKRKGFSTDIYGGYTGTAAAYMAIVRINKTKSSQYKVIAVPMTKRAILNKAEKEGNYEKILKQILSPSILYNDKGKRKAGVISFDIIKGKVPYNQVVQDGNKKFLLKSAIYLCNAKQLVLSEEAMRVITGHWLDSDKQDQELLDVYDEILEKIDRYLPLFDIRDFRNKLHKGREKFLKLNAEDKFKAIIQILKGLHDNSDTGELKDIGITVPFGQLQNNSGITLSSDTILVYQSPTGLFEKRVKISSL

SEQ ID NO: 491 - protein, 278 aa, Lactobacillus crispatus
SVNGKKLSVSVKQELYEDLFKKNNTVSAKQLKNWLIENQKLPYIKIKGLADQTKFNSSLSTYIKLKKSGLFVDKLDSNEFRDDFEKIIEWSTIFEDKQIYIQKLQTIDWLTAKQIQFLQNIRLQGWGRLSKKLLTAIVDSNGQNIIEQLWNSQQIFMSIVNKADIKGTITDANQDLMHSNSMEDILSEAYTSPANKKMIRQVVKVVHDIQKAASGQAPKQIAIEFARESRRNSKLSQTRGHKLQDIYQKISGDIVNKNLKDKLAEYIKNNQLNKDKYY

SEQ ID NO: 492 - protein, 277 aa, Lactobacillus crispatus
SVNGKKLSVSVKQELYEDLFKKNNTVSAKQLKNWLIENQKLPYIKIKGLADQTKFNSSLSTYIKLKKSGLFVDKLDSNEFRDDFEKIIEWSTIFEDKQIYIQKLQTIDWLTAKQIQFLQNIRLQGWGRLSKKLLTAIVDSNGQNIIEQLWNSQQIFMSIVNKADIKGTITDANQDLMHSNSMEDILSEAYTSPANKKMIRQVVKVVHDIQKAASGQAPKQIAIEFARESRRNSKLSQTRGHKLQDIYQKISGDIVNKNLKDKLAEYIKNNQLNKDKY

SEQ ID NO: 493 - protein, 1368 aa, Lactobacillus curvatus
MSRPYNIGLDIGTSSIGWSVVDDQSKLVSVRGKYGYGVRLYDEGQTAAERRSFRTTRRRLKRRKWRLGLLREIFEPYITPIDDTFFLRQKQSNLSPKDQRKLYTQTSLFNDRTDRAFYDDYPTIYHLRYRLMTEKRQFDIREIYLAMHHIVKYRGHFLNEAPVSSFKSSEINLVAHFDRLNTIFADLFSESGFQLETDKLAEVKALLLDNQQSASNRQRQALSLIYTPSTNKAVEKQNKAIATELLKAILGLKAKFNVLTGIEAEDVKAWTLTFNAENFDEEMVKLESSLDDNAHQIIESLQELYSGVLLAGIVPENQSLSQAMITKYDDHQKHLKMLKAVREALAPGDRQRLKQAYDQYVDGQENTKAYSKEDFYGDITKALKNNPDHPIVSEIKKLIELDQFMPKQRTKDNGAIPHQLHQQELDRIIENQQQYYPWLAELNPNSKRQTVAKYKLDELVAFRVPYYVGPLITAEQQRQSSDAKFAWLIRKAEGRITPWNFDDKVDRQASANEFIKRMTTTDTYLLAEDVLPKQSLIYQRFEVLNELNGLKIDDQPITTELKQAIFTDLFMQKISVTVKNIQDYLVSEKRYASRPAITGLSDENKFNSRLSTYHDLKMIVGDAVDDVDKQADLEKCIEWSTIFEDGKIYSAKLNEIDWLTDQQRVQLAAKRYRGWGRLSAKLLTQIVNANGQRIMDLLWDTTDNFMRIVHSEDFDKLITEANQMMLAENDVQDVINDLYTSPQNKKALRQILLVVNDIQKAMKGQAPERILIEFAREDEVNSRLSVQRKRQVEQVYQNISNELLNNTEIRNELKDLSNSALSNTRLFLYFMQGGRDMYTGDSLNIDRLSTYDIDHILPQSFIKDNSLDNRVLVSQKMNRSKADQVPTDFTSVELGQKMQIQWEQMLRAGLITKKKYDNLTLNPDHISKYAMKGFINRQLVETRQVIKLATNLLMEQYGEDNIELITVKSGLTHQMRTEFDFPKNRNLNNHHHAFDAYLTAFVGLYLLKRYPKLKPYFVYGEYQKASQQDKWRNFNFLNGLKKDELVDENTEAVIWDKESGLAYLNKIYQFKKILVTRGVHENSGALFNQTLYAAKDDKASGQGGKQLIPAKQDRSTALYGGYSGKTVAYMCIVRIKNKKGDLYKVCGVETSWLAQLKQLTDEDSQKAFLEQKISPQFTKVKKQKGNIIEAVEEFEVIAPHILINQRFFDNGQELTLGSATYKHNEQELILDKTAVKLLNGALPLTQSEELAEQVYDEILDQVMHYFPLYDTNQFRAKLSTGKAAFMKLPWKSQWDGNKMVQVGQQVILDRILIGLHANAAMSDLKVLKMTTPFGMIQQSTGITLSADTQIIYQSPTGLFERRVALRDL

SEQ ID NO: 494 - protein, 669 aa, Lactobacillus delbrueckii
MAKPKDYTIGLDIGTNSVGWVVTDDQNNILRIKGKKAIGARLFTEGKVAAERRSFRTTRRRLSRRRWRIKMLEELFDEEIAKVDPSFFARLHESWISPKDKRKRYSAIVFPSPEEDKKFHESYPTIYHLRDKLMKDDQKHDIREIYIAVHQMIKARGNFLHDESVETYRSGMSSLGGRSERNILSVQTLEELNDLFAENEGTEEVELNVASAEQINDILTGGHLNADSQKEISNLLLPSSFPSFDDKAKEKQVKKLINNVATNISKAWLGYKADFSTILNLAKVDKDQKKIFAFALQGGDEEDKVQELESLLEQSQTDIVDRLIEIRHAIVLSEIVPVGMTLSEAMIDKYDQHKEDLITLKAVIRNTKDKKKAAKLQAIYDLYVKKRHADLAKAMKLTGIKKRSELLDPEELKKGISSLLDDSPEAVEIKQRLEEKTFLPLQRSNNNGVIPNQLHQVELDEIIKKQSKYYPFLAEKNPDESEEAQKKAPTKLDALLTFRVPYYVGPMITKEEQEAQNGHSFAWMVRRDPQDHEAITPWNFEKKVDKMASATQFIKRMTTKDTYLLGEDVLPASSLKYQLFTVLNELNNLRVNGKKLTSDEKEQVIEGLFKKQKTVKADKFVKYWQAKHIGADIKVKGLSDPSKFNSTMSTYIDFKKIFGDQLNDVNRQR

SEQ ID NO: 495 - protein, 544 aa, Lactobacillus delbrueckii
MTGCADYDVDHIMPQSFVKDDSLDNRVLVARAVNNQKSDKVPALLFGNKVVADLGITVREMWDKWQKLGMISKRKLSNLLTDPDALTEYRAQGFIRRQLVETSQVIKLTATILQSEFPDSKIIEVPAKYNSIVRKQFDLYKSREVNDFHHAIDAYLSTIVGNYLYQVYPNLRRMFVYGEFKKFSSNAEESAHDVARRVKSMNFLDDLLRGTHGDNIYCRSTGEIVFNRNDIISKLKQAYSFKQMLVTQEVFTKKSALFDQTVYPSPERDSKKRSGLIPRKKGMDTEIYGGYSGNKDAYFVLAEAVKEKGHTLQIVGVPIRALNTLKNSANYSEKLLEIIKPQVMFNKDTGKPIKGIKDVKILMDKIPCRQPVLEGESYYMLASSKYRYSLKQISLSQMSMKYILDYIDDPNFNKHEMINIDQQDEKECLLSVYDEILEKMDKYLPLFDIRSFRKKLHDGRDAFIALPVASEEKKPGEVDVIRKILKGLHANADITNLAELGFGTAALGALVSTGGIKISDDAVFIYQSPTGLFERRVKVSDLLK

SEQ ID NO: 496 - protein, 1356 aa, Lactobacillus farciminis
MTKKEQPYNIGLDIGTSSVGWAVTNDNYDLLNIKKKNLWGVRLFEEAQTAKETRLNRSTRRRYRRRKNRINWLNEIFSEELAKTDPSFLIRLQNSWVSKKDPDRKRDKYNLFIDGPYTDKEYYREFPTIFHLRKELILNKDKADIRLIYLALHNILKYRGNFTYEHQKFNISNLNNNLSKELIELNQQLIKYDISFPDDCDWNHISDILIGRGNATQKSSNILKDFTLDKETKKLLKEVINLILGNVAHLNTIFKTSLTKDEEKLNFSGKDIESKLDDLDSILDDDQFTVLDAANRIYSTITLNEILNGESYFSMAKVNQYENHAIDLCKLRDMWHTTKNEEAVEQSRQAYDDYINKPKYGTKELYTSLKKFLKVALPTNLAKEAEEKISKGTYLVKPRNSENGVVPYQLNKIEMEKIIDNQSQYYPFLKENKEKLLSILSFRIPYYVGPLQSAEKNPFAWMERKSNGHARPWNFDEIVDREKSSNKFIRRMTVTDSYLVGEPVLPKNSLIYQRYEVLNELNNIRITENLKTNPIGSRLTVETKQRIYNELFKKYKKVTVKKLTKWLIAQGYYKNPILIGLSQKDEFNSTLTTYLDMKKIFGSSFMEDNKNYDQIEELIEWLTIFEDKQILNEKLHSSKYSYTPDQIKKISNMRYKGWGRLSKKILMDITTETNTPQLLQLSNYSILDLMWATNNNFISIMSNDKYDFKNYIENHNLNKNEDQNISDLVNDIHVSPALKRGITQSIKIVQEIVKFMGHAPKHIFIEVTRETKKSEITTSREKRIKRLQSKLLNKANDFKPQLREYLVPNKKIQEELKKHKNDLSSERIMLYFLQNGKSLYSEESLNINKLSDYQVDHILPRTYIPDDSLENKALVLAKENQRKADDLLLNSNVIDRNLERWTYMLNNNMIGLKKFKNLTRRVITDKDKLGFIHRQLVQTSQMVKGVANILDNMYKNQGTTCIQARANLSTAFRKALSGQDDTYHFKHPELVKNRNVNDFHHAQDAYLASFLGTYRLRRFPTNEMLLMNGEYNKFYGQVKELYSKKKKLPDSRKNGFIISPLVNGTTQYDRNTGEIIWNVGFRDKILKIFNYHQCNVTRKTEIKTGQFYDQTIYSPKNPKYKKLIAQKKDMDPNIYGGFSGDNKSSITIVKIDNNKIKPVAIPIRLINDLKDKKTLQNWLEENVKHKKSIQIIKNNVPIGQIIYSKKVGLLSLNSDREVANRQQLILPPEHSALLRLLQIPDEDLDQILAFYDKNILVEILQELITKMKKFYPFYKGEREFLIANIENFNQATTSEKVNSLEELITLLHANSTSAHLIFNNIEKKAFGRKTHGLTLNNTDFIYQSVTGLYETRIHIE

SEQ ID NO: 497 - protein, 1313 aa, Lactobacillus fermentum
MHYLDEIFAPHLQEVDENFLRRLKQSNIHPEDPAKNQAFIGKLLFPDLLKKNERGYPTLIKMRDELPVEQRAHYPVTNIYKLREAMINEDRQFDLREVYLAVHHIMKYRGHFLNNASVDKFKVGRIDFYKSFNVLNEAYEELQNGEGSFTIEPSKVEKIGQLLLDTKMRKLNRQKAVAKLLEVKVADKEETKRNKQIATAMSKLVLGYKADFATVAMANGNEWKIDLSSETSEDEIEKFREELSDAQNDILTEITSLFSQIMLNEIVPNGMSISESMMDRYWTHERQLAEVKEYLATQPASARKEFDQVYNKYIGQAPKERGFDLEKGLKKILSKKENWKEIDELLKAGDFLPKQRTSANGVIPHQMHQQELDRIIEKQAKYYPWLATENPATGERDRHQAKYELDQLVSFRIPYYVGPLVTPEVQKATSGAKFAWAKRKEDGEITPWNLWDKIDRAESAEAFIKRMTVKDTYLLNEDVLPANSLLYQKYNVLNELNNVRVNGRRLSVGIKQDIYTELFKKKKTVKVSDVASLVMAKTRGVNKPSVEGLSDPKKFNSNLATYLDLKSIVGDKVDDNRYQTDLENIIEWRSVFEDGEIFADKLTEVEWLTDQQRSALVKKRYKGWGRLSKKLLTGIVDENGQRIIDLMWNTDQNFMQIVNQPVFKEQIDQLNQKAITNDGMTLREWVESVLDGAYTSPQNKKAIWQVVRVVEDIVKAVGNAPKSISIEFARNEGNKGEITRSRRTQLQKLFEDQAHELVKDTSLTEELEKAPDLSDRYYLYFTQGGKDMYTGDPINFDEISTKYDIDHILPQSFVKDDSLDNRVLVSRAENNKKSDRVPAKLYAAKMKPYWNQLLKQGLITQRKFENLTMDVDQNIKYRSLGFVKRQLVETRQVIKLTANILGSMYQEAGTDIIETRAGLTKQLREEFDLPKVREVNDYHHAVDAYLTTFAGQYLNRRYPKLRSFFVYGEYMKFKHGSDLKLRNFNFFHELMEGDKSQGKVVDQQTGELITTRDEVAKSFDRLLNMKYMLVSKEVHDRSDQLYGATIVTAKESGKLTSPIEIKKKRPVDLYGAYTNGTSAFMTIIKFTGNKPKYKVIGVPTTSAVGLKRVGKPGSESYNQELHRIIKSNPKVKKDFEIVVPHVSYSQLIVDDDCKFTLASDTYQHPATQLVLSKESMEIIADDFKFVKENTATADEQLVRVFDEIVNQMNHYFTIFDQRSNRQKVTKARDKFVSLPTESEYEGAKKTQVGKTEVITNLLMGLHANSAQGDLKVLGLSTFGFFQSSGGLNLSEDAMIVYQSPTGLFERRICLKDI

SEQ ID NO: 498 - protein, 1327 aa, Lactobacillus florum
MTEQQQPYNIGLDIGTSSIGWAVTDQNDKLLHIRGHNGIGVRLFKEGESAAERRGFRTTRRRLSRRRWRLRFLDRIFDAELAKVDPNFLARLKQSNISPLDPNKQMFGNILFDDPQFDDQKFHQQYPTIYHLRSALAQPDAPQADVRLIYLALHHMIKFRGHFLNGAAVEKFHGGQLHLESEFQELNQIFSNQQRDHVQLQTSSLDEVATILKDNQRTPSDRQRELSARLFVPVDKTIDKENKKLATELLKAVLGLKAKFDVILGVEATDPQAFKLQFSSDDFDDKIAELASELTDEANEILTVLQRLYFSLNLADILTNRQTKQVADSISTAMINRYDDHKHHLKMLKELEAQVTQEQRDGLKKAYDEYIDGDKPTIDTFYTNIKKNLDDSELANQIKSLIDLQAFMPKQRSKENGSIPHQLHQRELDQLIEVQGKYYPWLLAAKDKLDALIAFRVPYYVGPMIDPNQSDDPQNTKFAWMVRKEAGEITPWNFEEKVDKTSSATNFIKRMTTTDTYLLGEPVLPKNSLLYQQFTVLNELNKLKVNGKALTVDQKKYLYEHVCKKQRRVTLKKLSDCLMARGDFPMGAIFTGTTDQKNMNNTLKTYQDFQEIFGDEIDNPDRQVDFEKMIEWSAIFEDREIFKLKLAELNWLTSEQLERVSKKRYQGWGRLSQKLLTHIVNENGERIIDQLWNTNQNFMEIMGQDSVKQAIQEHNGANVAQTGINETIDELYTSPQNKKAIRQILLVVDDIKKAVGYAPANIMMEFAREDRDDHRLIASRARQLEKTYQEISKNWFDNESVTQELKDQIKNKTKFTDRLYLYFIQGGIDLYTGHPLNIDQLSSYDIDHILPQSFLLDNSLNNRVLTSQAENRVHKEDRLPGETVANKMRPTWKMMREQGLMTQRKYNNLTLKPDQISKFNNRGQFINRQLVETRQVIKLAADIMSQKYQADQTKVVTVKANLTHHMREKFNFYKSRNVNDYHHAFDAYLTLFVGNWLLKEYPKLQPYFVYGDFAKTGTNNLKSFNFLYRFERDHKLNDKGAIDTDKDQQLGYMKRIYRFKKMLVTKQLETNEGALYGQTLYPAPKNDKKTRNLINSKKNRPSDIYGGYSNENGSFLTLVKLKKGSKYDYRLVAVPVSKISEIKESELATIEKAIAPQFLKSSGKYRDFQVVLSKILINQKVIDDGMIFTIGSKSYKHNAKQVVLSDNSIQIVSTLSRISDKEKLITVFDEIVDITSKYLPWYKVNDVEKTKMLFRQMQDIDEMKKIIDNSLIGLHCNASITDLGKVGLSKYWGRFVLTAGISLTVDAQLIYQSPTGLFEHRVKVSDL

SEQ ID NO: 499 - protein, 1386 aa, Lactobacillus hominis
MTKITEDYIVGLDIGTNSCGWVAMDSKNTILRMHGKTAIGSHLFDAGNSAADRRAFRTTRRRIKRRKWRLKLLEEIFDSHLAKVDPYFFARLKESGLSPLDTRKNVSSIIYPTSLEDKKFYVDNPTIYHLRYKLMTEDRKFDLREVYLAIHHIVKYRGNFLYNTPVKAFEASKIDVKGSLKKLNELYEGLDSEFNVELDSNNALEIENIIRDKKIFKINKVKEINQLLSLKTEDKERTKLMKDVSKQIVNAILGYKTKFETILLKDVSKDEADDWEFKLTDVDADNKFENLIGDLNENEQEILLVIRKLANAITLSNIVEEGKTLSESMKDKYKKHSDDLKLLKQVISDHPDRDKAKKLALAYDLYVNNRHGKILQAKDILEKKKTLSKEDFYKEIKKNLDDSKESQEILDAISLDSFMPKQRTNENGVIPYQLHQLELDKIIENQGKYYPFLKEVNPVSSHLKQAPYKLDELIRFRVPYYVGPLISPNESTKNKQTKKNQNFAWMIRKEQGQITPWNFDQKVDRMASANKFIKRMTTIDTYLLGEDVLPANSLLYQKFTVLNELNNVKINGKRISVPLKQELYNNLFKKNSTVTTNKLKSYLKENYKLIKVEIKGLSDEKKFNSGLTTYNKLKNLKIFDQQIDDPNYNKDFERIIEWSTIFEDKAIYKEKLKTIDWLSDRQIDKLSKIRMQGWGQLSKKLLSQLTDNNGQTIIEQLWDSQNNFMQIVNQADFKDAIAVANQNLLVDTSVEDILNEAYTSPANKKAIRQVVKVVDDIVKATSGKVPKQIAIEFTRDADDNAKISQSRANKLRKVYKEMSNELASETIRNELERVAKDQKLLKDKHYLYFMQLGRDAYTGELIDIDNLEQYDIDHVLPQSFIKDDSLENRVLVKKAVNNGKSDNVPVKLYGNRMATDLGMTIRHMWEKWKEQGLITKTKYNNLIIDPDKINKYESSGFIHRQLVETSQIIKLVSTILQSKYPDTEIIVVKARYNHYLRKRLNLYKSREVNDYHHAIDAYLSAICGNLLYQVYPYLRPFFVYGQYKKFSSEPEKEKIIYDKTRRYNFISQIFENKDNDIISRETKKKVFDKKDIIEKLKRAYNYKYMLVSRETETHDQEMFKMTVYPRLSRDTKKSRNLIPKKKDMPTEIYGGYTNNSDAYMIIARINKKKGPEYRVFGVPMRELVNLRKAEKNGHYKAYLKQVLEPEIMYSKNGKKNKTISSFEIVKAKVPYKQVILDGDKKFMLASSTYVQNAKQLTLSQYSMQAITDNCENDTEEEKALVEAYDEILTNIDKYLPLFDINKFREKLHAGREKFVDLPLAEKKETILQVLNGLHDNAVMPKIKSLGLSTPLGFMQFHTGVSLSENAKLIYQSPTGLFEKRLKISDL

SEQ ID NO: 500 - protein, 270 aa, Lactobacillus iners
MITYLKDNDDITLSFPKDQLINIFKNSNLNSTEKSDQLKPFFGRTNLEKGIIKLLSGGKQDLSNMFRDETLKNSNYKNLKFSDNRFDDERDGYAADLGDRIDLLILLKQIYDASILESMMSQARVSIDGHKYISSAKVCAYEKHKSDLKRLKSLIKKYLPSEYNNIFRKITEKDNYVAYSKSNITNNKREKALKYVKYVDFTKYLTKKLKTIKTQDAEDDQEIFEIKGELEKQSFLPKQRTLDNSIIPYQLHLMELKKYLIINLNIMTFC

SEQ ID NO: 501 - protein, 255 aa, Lactobacillus iners
MITYLKDNDDITLSFPKDQLINIFKNSNLNSTEKSDQLKPFFGRTNLEKGIIKLLSGGKQDLSNMFRDETLKNSNYKNLKFSDNTFDDERDGYAADLGDRINLLILLKQIYDASILESMMSQARVSIDGHKYISSAKVCAYEKHKSDLKRLKSLIKKYLPSEYNNIFRKITEKDNYVAYSKSNITNNKREKALKYVEYVDFTKYLTKKLKTIKTQDAEDDKEIFEIKGELEKQSFLPKQRTLDNSIIPYQLHLME

SEQ ID NO: 502 - protein, 343 aa, Lactobacillus iners
MLAKDDQEGITVKDKIISLLTFRLPYYIGPVNPAVHGKFAWVKRLANGKVTPWNYKEKIDIDASHEEFIKTKLSKCSFLIGCDVLPKNSLLYQKYMVLSELNTIKFNGVNISEKLKDDIYQNLFKNIQKVTKKRLQNYIKEHENIIGDVIVTGIDNAFKQGLVSYLKFKKIIGDKIDDDRYQKVLEKIIRDITLYDECAGKKIKKEYKDSDLFTEDELNKIVKLTFNDWGRLSAELLDQLEGEDTVSGETGKIIEFMQKHNYNLMQLMSKKFTFKYKIDEINKSYYQHDKFNYKSMIDSLYVSPATKRILWQSLKVVHEISKIMKHDPEKIFYRNGTFQRRSS

SEQ ID NO: 503 - protein, 447 aa, Lactobacillus iners
MLYDHKLIGDKKYARLIRSKAFTDDELAGFIARQLVETRQATKETADLLKRLCPKSRIVYAKAQNASIFRQKFDIPKSRTINDLHHAQDAYLNIVVGNIFDTKFTQDPRNFIKNTKDSRNYNLEKIYDYNVERNNYVAWIAPDSKTNGTIANVKCNLSTKDFRVTRPSFYKKGALFNQNLSRKGSNLAPIKEHSPKSNPLKYGGYSGKNNSFFVVVAGKDNKGKDIVKLIPVNTLIYNKMLHCDYKAKQELLTSYVANNFAINNFRIVKDDIKMYSLVKIDGAYYYLVGGTDERIEVKNAMQLLLSKDSIKAVKILEKESKDQFANIKNYKDIDIKLGRTFNEVISKYTNSVFGKSMLISDKYRKDIFKSVDKSILEFNSLNTIAKADNLLKFVTSMRPAGSVDALKMVGLIERIRKSNVISNFNEFKLINQSVTGLFENEEDLLKL

SEQ ID NO: 504 - protein, 667 aa, Lactobacillus iners
MQKHNYNLMQLMSKKFTFKSKIDEINKSYYQHDKFNYKSMIDSLYVSPATKRILWQSLKVVHEISKIMKHDPEKIFIEMARSKEDHPKRKLSRKADLKQVYKDSKKQIISIIGKDKYQDLSNELDNKDDRDLRWDNLYLYYTQLGRSMYSLKPIDISELMNKNLYDQDHIFPKSKKYDDSIENRVLVEKELNVKKSDIYPISDANIIPQKIKGQVESFWKMLYDHKLIGDKKYARLIRSKAFTDDELAGFIARQLVETRQATKETADLLKRLCPKSRIVYAKAQNASIFRQKFDIPKSRTINDLHHAQDAYLNIVVGNIFDTKFTQDPRNFIKNTKDSRNYNLEKIYDYNVERNNYVAWIAPDGETNGTIANVKCNLSTKDFRVTRPSFYKKGALFNQNLSRKGSNLAPIKEHSPKSNPLKYGGYSGKNNSFFVVVAGKDNKGKDIVKLIPVNTLIYNKMLHCDYKAKQELLTSYVANNFAINNFRIVKDDIKMYSLVKIDGAYYYLVGGTDERIEVKNAMQLLLSKDSIKAVKILEKESKDQFANIKNYKDIDIKLGRTFNEVVSKYTNSVFGKSMLISDKYRKDIFKSVEKSILEFNHLDTIGKADNLLKFVTLMRPSGSAHSLKMVGLIERIRKSNVISNFNEFKLINQSVTGLFENEEDLLKL

SEQ ID NO: 505 - protein, 1395 aa, Lactobacillus jensenii; identical to SEQ ID NO: 118

SEQ ID NO: 506 - protein, 1382 aa, Lactobacillus mucosae
MDIGTNSIGWTAIDDHFSLLRVKGKNAIGVRTFKEGETAADRRGFRTARRRLSRRRWRLQFLDEFFAPYLAEVDPNFLARLKQSDISAKDPAKNQEYMGKLLFPDQEAASDGNGYPTLIQMRKAMPAEKAADFPVFNIYQLRYALMNEKRKFDLREIYLAVHHIVKYRGNFLNNTSVDKFKADQIDFNKSFETLNDLFRQVQPIAPFQIDLTKVDELGKLLLDTKQKKLDRQKAVAKLLPLIEDGTDKEIVKAHQQTAREISKLILGYKAKVGLILQNNLDQTLDMSTENSDDQLMQIAEELDDYQMELINQLSLLYSQIMLNEIVPNGETVSASMLNRYYKHRCQLKELKDYGAAQDKKTREQLDHLYAEYIGQIPKDSKFDFTKDLKKLMDKSDLGQKIKDEIEAGDYLPKQRTSANGVIPHQMHQQELDQIIENQKEYYPWLAEPNPVEKNIKNAKYKLDQLVSFRVPYYVGPMITLADQQKTSKASFAWAVRKKAGKITPWNFYDMIDREKSANNFIKRMTNKDTYLLSEDVLPASSLLYQKFTVLNELNNIRVNGRKLQPALKQAIYTDLFQKRKTVNLKTLTNFLAIHEPTLTKPKIEGLSNGRSFNSSLGTYIDMSKILGDSLDDLNYRDDIEKIIEWSTVFEDSEIYGVKLQEIQWLTNEQREKLVRKRYQGWGRLSKKLLTGITDENGQRIIDLMWDTSKNFMQIVHQPVFEEQIAELNQQLLQDADKAPLEVVDDILADAYTSPQNKKAIRQVVKVVADVVKAVGNAPASISIEFARNEDRNKELKNSRRHSIEKLYHETAEKLVKQTNLLEELGNVKDLNDRYYLYFTQAGRDMYDGTPINIDEISTHYEIDHILPQSFLKDNSLDNRVLVKKSENAAKSDRVPAKLYGAKMRAFWKQLKESQLISNRKYLNLTTDPEQVDKYQMQGFVHRQLVETRQIIKLAANIFGSLYPDSAVIETRAELTKQLREKFSLYKVRDVNDYHHAVDAYLTAFAGHYLYQRYPKLRPMFVYGDYAKIYADDLKRLRSVNLFHDLEKDQYNSGTAVNPETKEKIVDVDWLSDYVSKIQHFKYMLISKAVYTQHGQLYGATILPVAQVDKISAPIGIKDDKPVDIYGAYTNEVAAYMAIVRVNGKKPKYKVVSVPVRMLQRLKMAEQKGHDQYMQTLHDVLLRNFTSLKKNRKTGLKEAVVKDFDVLVPCVRYNQLVIDGDTKFTLGSATYQHNAKQLVLCNHSLETLANNFEYVRKHPDEADERMIMLYDDILDQVNHYFTLYDKNKFREKLNAGRDKYLKLPTFSQFENNKKTAIGKSEAIINILRGLHANAAITNLKCLGVSTPFGQLQSPSGIELSENAKLVYQSPTGLFSREVLLKDL

SEQ ID NO: 507 - protein, 1382 aa, Lactobacillus pentosus
MKKIVNYNLGLDIGTSSIGYAAIDDQGRPVRHQNKTVMGVRLFKEGKTAESTRIFRGTRRRLSHRHWRLGYLDRIFDNEIAKVDENFLPRLKASKRARSDEKRSFRGSLLFPETGDDAYYQKYPTIYHLRYALITQKKQFDIRLIYLALHHMIKYRGNFLDTTPVSAFNIHDIDLTDQFASLNDCYQLLDMDFEFQFDLNNIEQVQKLLLDETLSKTKRQAAVSKVLVMSTGNKAFDDQQNGIASEFIKALLGGPFDLSKILNLSVADVKSWKLHMTDKDVDDTLNSLVEELDENHKQIVNLLQMIYSQVMMLGLLNGQQSISASMIERYDDHAKHWAALKKLLPALGEQEQSTIIHAYTAYTGHSRTKQLSRAEFYTKVNSILKKHENIAEATGLIELIDRNEFMPKQRDAVNGVIPHQLHQRELQLIIQNQQKYYPFLAAKAYPDADETMIEQLLSFRVPYYAGPLVDRDFINESSDQEQAMQNTKFSWLKRREAGEITPWNFEQKVDVQETANRFIKRLTTKDTYLMTEDVLPKESLIYQRFEVLNELNAIRINDRRLTAENKQLAFQQLFMAGNTKNVSIKKFRNFVFDSLKFPEKVKITGFAGQHNFLAKLSTYHDFKKIFGERVDHTDLQPDFERIVEWCTIFEDRHIYREKLKEIQWLSQSEIDQLVLIRNHGWGRLSKRLLTGIRDSDGRTVMDQLWFGTDNFMRIISQSDFAAAIANENRTQLNQHGLEDVLDSAFMSPQNKKAIRQVLKVVDDIEQTLGCPPKKVMIEFTRSPDKKKQRTVTRLEKVQQAYKAVADQLAGQSIVSELDQYANTHSKLSDTYYLYFMQLGRDLYSGKPIDIDSPMLDDDHILPRAFMKDNSLDNRALTEKPINNTKAAKFPSKVFGQQKEVTDFWKLLRRCGLMSNIKEKHLYLDPDNVDKWTRRGFIHRQLVETSQVIKIVANILNDRYQQSQTEVLEVPARLGTELRECFGWYKVREVNDYHHVFDAYLAAFIGNYLYRRYPKLQPYFVYGNFAELNKAQLKNIKSFNFLYNITDNKRVVKDIETGQTLWDDQIRQQIQHIYEYKYMLTSHEAFTQHKELYGQTIYPRREFKPGTLKAIKQDQPQELYGGYKNLTAAYMCIVKIQARKRRAAEYRVVRVATESLSALQQAKRLGVQAYERCLRQELVRNNEILRTNADPNSAPREFEVLLDRVLCHQMIISDGQKYLLGSHAYKINCMQLVLSNNSMKILSTSIVKLKQMTNEPLVQVYREILDVVNKYFTLYDVNSFRENLNQFFDKFRTLPITNEYESSKSGKKLIHRGQLETLTLILRGLHANSDKVQYGDQSTLLGGFQTKDGIKLSKDSVIQYTSPAGLNVRTVKLRDLEQKEAQK

SEQ ID NO: 508 - protein, 1361 aa, Lactobacillus pentosus
MNEPYGVGLDIGTNSVGWTVVDMNGRVRKVKGKTALGARLFKEGATAEDRRGFRTTRRRLKRVKWRLRLLREFFDQPISKIDPNFFARRKYSDISPRDPNYNGLAKTLFNDRTDKEFYDDYATIYHLRDKLMTSNRKFDIREIYLAIHHIVKYRGNFLRTGPASQYGSASLHLATSFQKLNDLFAQSEETLNLKLVTDEALLQQIQQILVRTDLSRSEQQRQIWPLMAVLTGASAAEKKRQKNVVVELSKALVGLKAKMNVVTLTEVDAAVVKDWTFTMEESQDKLPEIEEQLSEVGQQIMDEVIQLYASVNLAQLIPAGKRFSQHMVEKYKHHEKNLELLKAYIHSQSDSKRGREIRATYDRYIDGVDSKPVTQEMFYKDLMKYVEADATSNHLAAEIKDEIDSEQFMPKLRTKQNGSIPYQVQQYELDQIISHQKKYYPWLGEENPVAERRGKFPYKLDELVGFRVPYYVGPLITKEDQQATSGAGFAWMVRKADGPITPWNFDQKVDRIASATAFIQRMQTTDTYLIGEDVLPARSLIYQRFMVLNELNNMRVEDRKLAPQQKQRLYNQVFKQHQHVSVKNIQQNLMDAGEYRKTPQITGLADPKGFNSSLSTYHDFKKILLEAIADEHKRADIEKIILWSTTFEDSAIFKQKLEEVAWLTDAQRKQLSGLRYRGWGQLSHKLLTAFKDDKGRSIMDGLWETSDNFMQLRKQPAIETQIKEANQANLTDADIQDTINELYTSPQNKKAIREVMLVLDDIKNAMHGQTPSWIFVEAARGGGVAGRRTQSRSSQIVEAYKGTAKEIVSEKVQHELNEKIKAKADFNTRLVLYFLQNGRDLYTNEAINIDRLSEYDIDHILPQSLVKDDSLDNRVLTSARINREKNDTFASEKFGRKMGAQWRELHRNGLMTQRKLKHLLMRPDEISKHATDFINRQLVETRQVIKLVEELISSEYPAASIVAVKANLTHQFRQTFNFPKLREVNDYHHAFDASLTAFIGMYLLKQYPKLERFFVYGKFAKQPINLTRFNIIRKLAVAEKPIANIETGEILWDKTADIKYFEKLYNYKRLLVTHEVRENYGAMFKQTLFKASYNKSKTLVPKKNHMETSVYGGYSNQETAYLAIVRIPFKSGFKFIVVGIPTRMVAKIKHYQSLGATLNQATHKVIEPKFTKISRKTKQTVISDYEVVLPKVYLDQVVRDQVKGQMYRFSLGSDKEYHNVQELYLPLSIQQAFVGHYDESDDQRSNDLVKVYDAALKQLQRYFPLHLSRNFDQVASQAHQSFEGLKNNVQTSDKQLGKKEVLNSLFVGLHANATRSNLSVLGMSKDFGRIKSNGITLTDQAEIIYQSPTGLFERKVALKDL

SEQ ID NO: 509 - protein, 1358 aa, Lactobacillus pentosus
MNEPYGVGLDIGTNSVGWTVVDMNGRVRKVKGKTALGARLFKEGATAEDRRGFRTTRRRLKRVKWRLRLLREFFDQPISKIDPNFFARRKYSDISPRDPNYNGLAKTLFNDRTDQEFYHDYPTIYHLRDKLMTSDRKFDIREIYLAIHHIVKYRGNFLRTGPASQYGSASLHLATSFQKLNDLFAQSEESLNFKLVTDEAQLQQIQQILVRTDLSRSEQQRQIWPLMVVLMGATAAEKKRQKDFAKELANALVGLKAKLNVVTLTNVDTTVVKDWTFTLEESQDKLPEIEEQLSEVGQQIMDEVIQLYASVNLAQLIPAGKRFSQHMVEKYNHHEKNLELLKAYIHSQSDSKRGREIRATYDRYIDGVKSKPVTQEMFYKDLMKYVEADATSNHLAAEIKDEIDSEQFMPKLRTKQNGSIPYQVQQYELDQIISHQKKYYPWLGEENPVAERRGKFPYKLDELVGFRVPYYVGPLITKEDQQATSGAGFAWMVRKADGPITPWNFDQKVDRIASATAFIQRMQTTDTYLIGEDVLPARSLIYQRFMVLNELNNMRVEDQKLAPRQKQRLYNQVFKQHQHVSVKNIQQNLMDAGEYRETPKITGLADPKGFNSSLSTYHDFKKILPEAIADEHKRADIEKIILWSTTFEDSAIFKQKLEEVAWLTDAQRKQLSGLRYRGWGQLSHKLLTAFKDDNGRSVMDGLWETSDNFMQLRKQPAIETQIKEANQANLTDADIQDTINELYTSPQNKKAIREVMLVLDDIKNAMHGQTPSWIFIEAARGGGVAGRRTQSRSKQIVEAYKSTAKEIVSEKVQHELNEKIKAKADFNTRLVLYFLQNGRDLYTNEAINIDRLSEYDIDHILPQSLVKDDSLDNRVLTSARINREKNDTFASEKFGRKMGAQWRELHRNGLMTQRKLKHLLMRPDEISKHATDFINRQLVETRQVIKLVEELISSEYPSASIVAVKANLTHQFRQTFNFPKLREVNDYHHAFDASLTAFIGMYLLKQYPKLERFFVYGKFAKQPINLTRFNVIRKLAVAEEPIANIETGEILWDKTADIKCFEKLYNYKRLLVTHEVRENYGAMFDQTIFKATDSRKRLIQKKKGFATETYGGYTGRTLAYLAIVKVVTNKDTQYQVVGIPTTMVTQIQQLEASGLTSKQAVTKAIGAMINENNKKLQSYEVLLPKVRFEQVVRDEVKGHIHRFALGTDTYYHNIQELYLPLTIQRAFLGKRNDTDAQTEQNLLTVFETTLAQVNRYFPLYEMNKFKQILNSAQEKFAALPTKNKTVKNKLVTGKDGVLNNLFIGLHANASLGDLKILGMKIGFGKLQVPGGLKLTDQAEIIYQSPTGLFERKVALKDL

SEQ ID NO: 510 - protein, 1358 aa, Lactobacillus plantarum
MKEPYGVGLDIGTNSVGWTVVDASGHVRKIKGQTGIGVRLFKEGAAAADRRGFRTTRRRLKRVKWRLRLLREFFDQPISKVDINFFARRKYSDVSPRDPNYNGLEKTLFNDRSDQDFYHDYPTIYHLREALMTQHRKFDVREIYLAIHHIVKYRGNFLRNDAATAYRSGTLDLQQHFETLNHLFSQADLELNLNLTTDVALLDSIKQTLVRTDISRSDRQKLIMPLLAVLTGATTAEKKRQKAVVTEFAKALVGNKTKIDVLTLTDIDATEAKDWAFSLEENQDKLPGIEDRFSEVGQQIIDEVIRLYASVNLAQLIPEGKRFSQSMVEKYKRHGEDLKLLKAYIRSQSDAKRGRAIRATYDQYIDGVKSKQVTQEAFQKALGKFVDADVDLNSWAAQIKQAIDSEQFMPKLRTKQNGAIPYQVQQNELDQIISNQKEYYPWLGEENPVIKRRGKFPYKLDELFGFRVPYYVGPLITKEMQAATANAGFAWMVRKADGPITPWNFDDKVDRVASATAFIQRMQTTDTYLIGEEVLPARSLIYQRFMVLNELNNIRVDDGQLTPRQKQRLYNQVFKKHKRVTAKNIQDNLVAAREFPTAPRITGLADPKVFNSSLSTYHDLKQVLPEAMSDVRKQADIEKIILWSTIFEDSTIFKQKLTEISWLTAAQLKQLGQLRYRGWGQLLRKLLTGLKDDNNRSIMDGLWETNANFMQLRSQPAIENQIKSANQANLTTADLQDTINELYTSPQNKKAIREVMVVLADIKDAMHGQTPNWIFVEAARGGGVAGRRTQSRSKQIVAAYQGTAQAIVRDQVQRELKEKIKNKANFNTRLVLYFLQNGRDLYTGDAINIDRLSEYDIDHILPQSLVKDDSLDNRVLTNARINREKNDTFASEKFGKKMGAKWKEMHRMGLMTKRKLDHLLMRPDEISKYATGFINRQLVETRQVIKLVEELINAEYPSTAIVSVKANLTHQFRQTFDFPKIREVNDYHHAFDAALTAFIGTYLLKRYPKLERFFVYGKFAKQPVNLTRFNVIRKLAKTDTPITDIDTGEVLWDKLTDIKYFETLYDYKRLLVTREVSENYGAMFDQTLLKASDNGKRLIRKKQSFDTAIYGGYTGKTLAYMAIVKVSTKKDVQYQVVGVPTTMVTQIEQLEQQGMTNKQAVTKVIEPLIAANNKKMLTYEVLLPKVRFEQVVRDRIKGQTHRFALGTDTYYHNIQELYLPLTLQRAFLGKQNESEVQLNQNLLTVFDATLAQVNRYFPLYEMNKFKKILNSARDQIELLEAKNQFVKNKLVLGKQGILTNMFIGLHANASYGDLKVLGVKIDFGKLQVPGGIKLTGDAEIIYQSPTGLFERKIALKDL

SEQ ID NO: 511 - protein, 1361 aa, Lactobacillus rhamnosus
MTKLNQPYGIGLDIGSNSIGFAVVDANSHLLRLKGETAIGARLFREGQSAAERRESRTTRRRLSRTRWRLSFLRDFFAPHITKIDPDFFLRQKYSEISPKDKDRFKYEKRLFNDRTDAEFYEDYPSMYHLRLHLMTHTHKADPREIFLAIHHILKSRGHFLTPGAAKDFNTDKVDLEDIFPALTEAYAQVYPDLELTFDLAKADDFKAKLLDEQATPSDTQKALVNLLLSSDGEKEIVKKRKQVLTEFAKAITGLKTKFNLALGTEVDEADASNWQFSMGQLDDKWSNIETSMTDQGTEIFEQIQEHYRARLLNGIVPAGMSLSQAKVADYGQHKEDLELFKTYLKKLNDHELAKTIRGLYDRYINGDDAKPFLREDFVKALTKEVTAHPNEVSEQLLNRMGQANFMLKQRTKANGAIPVQLQQRELDQIIANQSKYYDWLAKPNPVEKHRASKPYQLDELLTFRIPYYVGPLITPKEQAESRENVFAWMIRKDPSGNITPYNFDEKVDCPASANMFIQRMKNTDTYLIGEDVLPKRSLLYQKYEVLNELNNVSIDGRRLGADQKQRLIREVFERHSSVTIKQVAENLVAHGDFAKRPEIRGLADEKRFLSSLSTYHQLKKILHEAIDDPTKEHDIENIITWSTVFEDAAIFKTELAKISWLDSDTIKALSNIRYRGWGQFSRKLLDGLKLGNGHTVIQELMLSNHNLMQILTDETLKTTMAELNQDKLKADDIEDVINDAYTSPSNKKALRQVLRVVEDIKHAANGQDPSWLYIETADGPGTAGKRTQSRQKQIQTVYANAAQELIDSAVRGELEDKIADKASFTDRLVLYFMQGGRDIYTGAPLNIDQLSHYDIDHILPQSLIKDDSLDNRVLVNATINREKNNVFASTLFASKMAATWRKWHEAGLISGRKLRNLMLRPDEIDKFAHGFVARQLVETRQIIKLTEQIAAAQYPNTKIIAVKAGLSHQLREELDFPKNRDVNHYHHAFDAFLAARIGTYLLKRYPKLAPFFTYGEFAKVDVKKFREFNFIGALTHAKKNIVAKDTGEIVWDKERDIQELDRIYNFKRMLITHEVYFETADLFKQTIYAAKDSKERGGSKQLIPKKQGYPTQVYGGYTRENTAYLAVVKTVEKKADVYRVVRIATSQVAALKEARAQSTVKERELLKKFLTTKFTKIGKNGKKAITPFDIVIPRVPREQLFHNKRYGFFMVNSDTLMHNYQELWMSRSDQQILSKLVKSAKTVENGQVGRLFENIVEQINKYFPLYDINQFRKKLDQSKDIFSKLPLEGNGTTSGKRETIQNILTGAGTGAKNGDLKNLGIKTPFGFLQVPSGIVLDDDTTLIYQSPTGMLNRIVRLSEL

SEQ ID NO: 512 - protein, 1361 aa, Lactobacillus rhamnosus
MTKLNQPYGIGLDIGSNSIGFAVVDANSHLLRLKGETAIGARLFREGQSAAERRESRTTRRRLSRTRWRLSFLRDFFAPHITKIDPDFFLRQKYSEISPKDKDRFKYEKRLFNDRTDAEFYEDYPSMYHLRLHLMTHTHKADPREIFLAIHHILKSRGHFLTPGAAKDFNTDKVDLEDIFPALTEAYAQVYPDLELTFDLAKADDFKAKLLDEQATPSDTQKALVNLLLSSDGEKEIVKKRKQVLTEFAKAITGLKTKFNLALGTEVDEADASNWQFSMGQLDDKWSNIETSMTDQGTEIFEQIQELYRARLLNGIVPAGMSLSQAKVADYGQHKEDLELFKTYLKKLNDHELAKTIRGLYDRYINGDDAKPFLREDFVKALTKEVTAHPNEVSEQLLNRMGQANFMLKQRTKANGAIPVQLQQRELDQIIANQSKYYDWLAKPNPVEKHRASKPYQLDELLTFRIPYYVGPLITPKEQAESRENVFAWMIRKDPSGNITPYNFDEKVDCPASANMFIQRMKNTDTYLIGEDVLPKRSLLYQKYEVLNELNNVSIDGRRLGADQKQRLIREVFERHSSVTIKQVAENLVAHGDFAKRPEIRGLADEKRFLSSLSTYHQLKKILHEAIDDPTKEHDIENIITWSTVFEDAAIFKTELAKISWLDSDTIKALSNIRYRGWGQFSRKLLDGLKLGNGHTVIQELMLSNHNLMQILTDETLKTTMAELNQDKLKADDIEDVINDAYTSPSNKKALRQVLRVVEDIKHAANGQDPSWLYIETADGPGTAGKRTQSRQKQIQTVYANAAQELIDSAVRGELEDKIADKASFTDRLVLYFMQGGRDIYTGAPLNIDQLSHYDIDHILPQSLIKDDSLDNRVLVNATINREKNNVFASTLFASKMAATWRKWHEAGLISGRKLRNLMLRPDEIDKFAHGFVARQLVETRQIIKLTEQIAAAQYPNTKIIAVKAGLSHQLREELDFPKNRDVNHYHHAFDAFLAARIGTYLLKRYPKLAPFFTYGEFAKVDVKKFREFNFIGALTHAKKNIVAKDTGEIVWDKERDIQELDRIYNFKRMLITHEVYFETADLFKQTIYAAKDSKERGGSKQLIPKKQGYPTQVYGGYTRENTAYLAVVKTVEKKADVYRVVRIATSQVAALKEARAQSTVKERELLKKFLTTKFTKIGKNGKKAITPFDIVIPRVPREQLFHNKRYGFFMVNSDTLMHNYQELWMSRSDQQILSKLVKSAKTVENGQVGRLFENIVEQINKYFPLYDINQFRKKLDQSKDIFSKLPLEGNGTTSGKRETIQNILTGAGTGAKNGDLKNLGIKTPFGFLQVPSGIVLDDDTTLIYQSPTGMLNRIVRLSEL

SEQ ID NO: 513 - protein, 1352 aa, Lactobacillus ruminis
MNDNFDLMRVKGKKGIGVRLYNEGQSAAERRMHRTARRRYGRRKWRLRLLEDFFDEHMAEVDDTFFARLKDSNISPKDDKKYRKSLLFPKSKGVTYQDDGEFYKKYPTMYHLRYALMTEHRKFDLREIYLAFHHMVKYRGNFLYDTSVDSFEAKNLDIKGKFDEINDLLSSYTDFYVDNSNAALVESILLEKNTTRKDKSKKIAKLLHVEDKEKGKNKKAKDLATQISNAVLGLKCNFHLIFELQQKYSFDLCSEKTEENIAKLSEVLDENQKMLLMILKEVQDQVMLNAFVPSGMSLSEAMMQKYDDYGEQLKIYHELEHSVSDDSAAKLRGAYRDYNDNIIKRIDGDNKKDTFYKRVKNILTKISKEYVDQDVLESCGKLKKLIDENKLFIRQRTAANGVLPHQLHQIEMRKIIDNQKEYYPWLAEPNPNEKRRVYSKYKVEELIAFRIPYYVGPLVDPNNADKNKEARFSWMVRKKDGEITPWNFYDKVDWAESANNFIERMKSKDTYLLGEDVVPKESMLYQKYEVLNELNNLRINDSGLSDSFEDVKLKQAIYNDLFKKQKIVKITDLQNYLVQNHKYLVKPKISGLADENRFLSSLSTYSDLKTIFGDKVDDRTYFNDFEKMVEYSTVFEDGHDYNQKLDEYTWLTKEEKYKIGKKRYRGWGKLSKKLLTGLRDKNNHTIMDNLWETNRNFMQIQTADEFSKQIAEENERHLKGSVSDAINDMYTSPANKKAIRQVLRVVDDIQKAMGYAPSSISLEFAREDGPSVRTVSRANRMKSIYEKYASEVSEEVMKDLDGVIKDKKGLNDRLYLYFEQQGKDMYSGHPLDFDKVISGQEYDIDHILPQAVIKDDSLDNRVLTTKALNNDVKSKGVPCRMFNGMHSFWKNLYDKGFISRRKFNNLTTNPENIDKYKMKGFVNRQLVETRQIIKLVANVLNDKYQNDDVDIIEVRAELTHDVRKHFKFYKNRNVNDYHHAFDAYLTSFIGHYLFKKYPNLRPLFDYNDFMKVSDNVFKQLRGNNFLGEFLNKTGDIISTDGNFVLNKEEMINKLNKAYAFKKILVTKEVGQRTGAMFNETRYPAPNSRKAALKYRRMPKPDSLISVKDYKNTDIYGGYSGKNDAYMVIVDMGKQYMVVGVPVRYTEKLDKLRIKHSELYRDELRKVLSRDKTLLDSKGNVKRFDIVLDRVLYGQLIEDGNELFTLGSSKYKRNFRQLFLDKQCIEILDSSATPQPTDEELIWVYDQILDKVDKYFELYDINRQRETLRKGRAAFCSLPNISMKKDDVTKKKILNEILVALHANESESNCEKIGKKVFGRLQVPGGIKLSKEAKLIYQSPTGLFERVVYLKDL

SEQ ID NO: 514 - protein, 1339 aa, Lactobacillus salivarius
MERYHIGLDIGTSSIGWAVIGDDFKIKKKKGKNLIGTRLFNEGATAAERRGFRTQRRRLNRRKWRLKLLEEIFDPYMAEVDEYFFARLKSSNLSPKDSNKKYLGSLLFPDKSDSNFYDKYPTIYHLRRDLMEKDEKFDLREIYLAIHHIVKYRGNFLEKVPAKNYKNSGASIGFLLEEVNSLYKDIIGDESIAILNSEKFEDVEKIILDEETRNLDKQKSVGKLLVEDKKKKNIVTAFSKAIFGYKFNIEDLLLIENDEKNKLTFNDENIDDIFNELSHSLDDKQMDLLTKTREIYFKFKLNMIVPTGYTLSESMIEKYEMHKAHLKMYKEFINTLNTKDRKILKNAYSDYINTEKAKAANAQENFYKTVKKIIKDNNSDTAKKIIVLIDEGNFMPKQRTGENGVIPHQLHQIELDRIIENQAKYYPWLAEANPVEKNRKFAKYKLDELVTFRVPYYVGPLIDKTESNKNEKETKFAWMVRKAKGTITPWNFENLVDRTESANRFIKRMTSKDTYIIGEDVLPASSLLYEKFKVLNELNNIKVNEKKLDIEQKQDIYLNLFTTAKNVTKKSLATYLNCSADSISGLSDGEKFNSSLSSYIDLKAILGNIVDDCNKNEDLEKIIEYSTVFEDGNIYKEKLSEISWLTDEQIEKLSNIHFKGWGRLSKKLLTQITNENGERIIDALWNTSNNFMQIINDESIQAKLAEINGKYAGKSDLEDILSEAYTSPQNKKAIRQVMKVVEDIEKAMQCEPTSISIEFTRKKQKSRLTNTRYKKISDVYEKIADEVISEYELRKLQSELDSNANNMRDRYYLYFMQLGRDMYTGEKINIDELHQRYDIDHILPQSFIKDDSINNRVLTRKDVNNKEKSDKTAADLYAVEMSDFWRKLRKQGLITEQKYKNLLTKSDSIDKYAKKGFIKRQLVETSQVVKLVANILQDKYSDTKIIEVRAKLNSNLREEYKLIKNRAVNDYHHAIDGYLTTFIGQYLYKTYPKLRSYFVYNDFKKLDSNYLKHMKKFNFLWQLQDDKTIDIYDNVNNKFVLNVPEMKKYIQKIYNYKYMLVSKEVTTKNGAFYDQTKYNAKTVNLIPIKKNKPTNIYGGYKGKVSSYMMLVKIRKKKEVIYKFVGVPRLWTDELDRLKDTTERKILLNEIAKNSLSKTEQDFEVILDKVYYGQLIIDGNQKYTLGSSEYKYNAMQLHLSKHALEVLAKENVKDAEITDKDLVSVYEEILSVVNKYFELYDINKFRQKLNEGLEIFRKLPVYNVYESNKIKQVGKFEVLNRILMGLHANAMITDLKVLGIKTKLGQMQVNGGIKLSPDAKLIYQSPTGIFSRAVRVKDLG

SEQ ID NO: 515 - protein, 629 aa, Lactobacillus salivarius
MERYHIGLDIGTSSIGWAVTGDDFKIKRKKGKNLIGTRLFKEGNTAAERRGFRTQRRRLNRRKWRLKLLEEIFDPYMAEVDEYFFARLKDSNLSPKDSNKKYLGSLLFPDISDSNFYDKYPTIYHLRRDLMEKDEKFDLREIYLAIHHIVKYRGNFLENVPAKNYKNSGASIGFLLEEVNNLYKDIVGDENVTILNSEKFEDVEKIILDDGIRNLDKQKGVGKLLVEDKKNKNLVTAFSKAIFGYKFNIEDLLLVEGDEKSKLTFNDENIDDIFNELSHSLDDRRMDLLTKTREIYFKFKLNMIVPTGYTLSESMIEKYEIHKAHLKMYKEFINTLNSKDRKILKNAYTDYINNEKAKAANAQENFYKTVKKTIKDNDSDIVKKIIDLIDEGNFMPKQRTGENGVIPHQLHQIELDRIIENQAKYYPWLAEENPVEKNRKFAKYKLDELVTFRVPYYVGPLVDKTESNKNEKETKFAWMVRKSKGTITPWNFENLVDRTESANRFIKRMTSKDTYIIGEDVLPASSLLYEKFKVLNELNNIKVNEKKLDIEQKQNIYLKLFTTTKNVTKKNLATFLNCSIESISGLSDDKKFNSSLSSYIDLKVILGDIVDDYSKNEDLEKIIEYSTIF

SEQ ID NO: 516 - protein, 897 aa, Lactobacillus salivarius
MLIESDEKNKLTFNDENIDDIFNELSHSLDDNQMDLLTKTREIYFKFKLNMIVPTGYTLSESMIEKYEMHKAHLKMYKEFINTLNAKDRKILKNAYSDYINNEKAKAANAQENFYKTIKKTIKDNNSDTAKKIIGLIDEGNFMPKQRTGENGVIPHQLHQIELDRIIENQAKYYPWLAEENPVEKNRKFAKYKLDELVTFRVPYYVGPLVDKTESNKNEKETKFAWMVRKAKGTITPWNFENLVDRTESANRFIKRMTSKDTYIIGEDVLPASSLLYEKFKVLNELNNIKVNKKKLDVEQKQHVYLDLFTTRKNVTKDNLATSLNCDVESITGLSDNEKFNSSLSSYIDLKAILGNAVDDCNKNKDLEKIIEYSTIFEDGNIYKEKLSEISWLTDEQIEKLSNIHFKGWGRLSKKLLTQITNENGERIIDALWNTSNNFIQIISDESIQAKLAEINGEYADKSNLEDILDEAYTSPQNKKAIRQVMKVVEDIEKAMKCKPTSIAIEFTRRKGKSKLTNTRYKKISETYEKITDELISEYELGKLQSKLDSKANNMRDIYYLYFMQLGRDMYTGEKINIDELHQYYDIDHIFPRSFIKDNSLNNRVLTRKEINNNEKADRTAADLYAVKMGDFWRKLRKQGLITEKKYKNLLTRTDSIDKYTKQSFIKRQLVETSQVVKMAANILQDKYSNTKIIEVRARLNSDLRKEYELIKNREVNDYHHAIDGYLTIFIGQYLYKTYPKLRSYFVYDDFKKLDSNYLKHMDKFNFIWKLEDKKAEDVYDNVNNEFILNVPKMKDYIQKIYNYKYMLISKEVTTESGAFYXZTKYNAKTINLIPIKKDKPTNIYGGYKGKVSSYMMLVKIQKKKEVIYKFVGVPRLWTDELDRLIDTDEKKALLKK

SEQ ID NO: 517 - protein, 1419 aa, Lactobacillus sp.
MAKPQNYTIGLDIGTNSVGWTVTDDQNNILRIKSKKAIGARLFEEGKVAAERRSFRTTRRRLSRRKWRIKLLEELFDEEISKVDPNFFARSHESWISPKDKRERYSAIVFPTPEEDKKFHNEYPTIYHLRDRLMKDDQKHDIREIYVAIHHIMKYRGNFLHDESIETYRSGMSSLGGGDERTILNTKILDDLNDAFADNLATQGISVNSASADQINEIVTSGHLNVDSQKAIAKLLLPTTLSSDDKKQDKKIKKLATDAAKNVASAWLGYKANFAAILNIQEVDKDKKKIYSFALQGADEEDKVETLESVLSQDQIEIVDRIIRIRHAIVLGEIIPVGMTLSEAMIEKYDQHAKDLKNLKTVIRNLKDRKNAVKLQAIYDLYVNNRHADTAKAMKLAGVKKRTELLEPEEFNKSIEKLLDDSPVSAEIKKRIAEKDFLPLQRSNSNGVIPNQLHQIELDEIIKKQSKYYPFLGETNEHASADVARKAPTKLDQLLTFRVPYYVGPLITKEEQEEQDGHSFAWMIRKNPKDHEKITPWNFDEKVDRMASATQFIKRMTTKDTYLLGEDVLPSSSLKYQLFTVLNELNNLRINHKKLTREEKEQVIEDLFKKYKTVKADKFKNYWQKGHAGLDVKIQGMADPEKFNSTMSTYIDLQKIFGDQLDDAQRQNDFEKIIEYSTIFEDRKILGEKLRADFVWLSEDQIKRLCRLRLQGWGRLSLKLLTRLTDADGQNVLERLLNSNDNFMQIVKDPVIKAKIEQKNQKLLRADWSENATESILDEAYTSPQNKKAIRQVMRVVHDIVKACDGNLPAKFAIEFARSQDDDPKRTVARADRLQKIYAQISDEVVSQGVKDQLSGMKSLKDRYYLYFMQGGRDAYTGKPLNIDRLSDYDIDHIMPQSFIKDDSLDNRVLVTRAVNNQKSDNVPVLLYGNHLVADLGITIREMWDRWQKSGMISKRKLANLLTDPATLSEYRAEGFINRQLVETSQVIKLTATILQSEFPDSKIIEVPAKYNSILRKQFDLYKSREVNDYHHAIDAYLSTIVGNYLYQVYPNLRRLFVYGEFKKFSHGEEESSHQAVRRVKSMNFLDDLLRGKHGDDIYCRVTGEVIFSRKDIISKLKQAYSFKQMLVTQEVFTKKSALFDQTVYPSPARDSKTRSGLIPRKQGMDTEIYGGYSGNKDAYFVLAQVVKSKGHTLQVVGVPIRALRALANCSNYSEQLLKIVKAQVLFNKKTGKAKKGISDVRILLDKIPYRQPVLDGSAFYMLGSSTYKYNLKQISLSQQSMKYILDYIDDPNFNKHEMTKIDQQNEKECLLSVYDEILDKMDKYLSLYDINGFRKKLHVGRDKFIKLEVEKQAEAIKNVLRGFHANSDMTKLSDLGLSTSLGFMQASDGIKLSDNAVFIYQSPTGLFERRVKVSDLLK

SEQ ID NO: 518 - protein, 1289 aa, Lactobacillus versmoldensis
MRRRYRRRRNRLNWLDELFADELAKIDPSFLLRMKNSWVSKKESTRKRDPYNLFIDEKYNDVDYFNQYPTIFHLRKELITEDKKVDIRLIYLAIHNIIKYRGNFTLENQNFDISQLSSNFSQQISDFFALFSDFGVIMPEDFDPDKISDILLNPNLSPSGKVSEAIATISPKTNVKAKIKIILLLLVGNNGDLKKLFDLETTEKIAVKLSSRHIDSELPIILSELNEQQENIITIANSIFGSIILKDFLGDETSISAAKVISFEDHKQDLQKLKTMWRETSNKEAVKAGKKAYEDYIGHEDSETFYKKIKKFLEKAQPVDLANKALAEIELENYLPKQRNRNNTVIPYQLNENELIAILDHQEKYYPFLKENRDKILSLLTFRIPYYVGPLQDSNNNRFSWMTRKASGAIRPWNFSEKVNVEQSSNDFIKRMRSTDTYLIGEPVLPKKSLIYQCYEVLSELNNTRVKDGSSNPKRLDVTIKQRIYNEIFKNQKSVSVKVLQNWLIKESYFKSPEISGLADKKKYLSSLSTYIDFKKIFGQRFVDDPVNSPQLEELAEWLTLFEDKKILLIKLQNSKYSYDQATINKLSTMRYQGTGKLSKKLLVDLKTTKKSIGKSGAESLSILDLMWSTKDNFMQIIHDADYTFEQQIKEFNYDTEDELTPLEKVANLHGSPALKRGLNQSIKVVADIVKFMGHDPEKIFIEFTRSDDFSKLTISRYRRIKKQYLEIAKAIKKIPAEFKDIKEYQTQLEENKGKLASERLMLYFLQCGHSLYSNKPIDLNMINSSKYHVDHILPQSYIKDDSLENKALVLASENENKIDNMLISHDIIATNLPRWQALKDQNLMGSKKFADLTRTTVTENQKKGFIQRQLVQTSQIVKNITLILNDLYKNTSCIETRATLSSEFRKAFSNFDETTYHYQFPEFVKNRDVNDFHHAQDAFLACVIGEYQLKKYPKDNLRLVYDQYSKFLDSLKKDTRKKNGRMPRYTQNGFIIGSMFNGKTYVDDNGEIIWDQKIKESIRKTFNYHQFNVVRQTIEQHGKLFNDTIQPHSDRYKLIPLKTNRDPAIYGGYNNDNNAYSVVLDVDGKKKINGIPIRIANQLKSDELDLSSWLENNIKHKKPMTILIDKVPKYQRIINEETGDLLITSANEVINNVQLFLPSMYTALISLLDSTKTEMYSKLLSNYEANILIDIYDYLLTKLKNNYPLYRKEWAKLAEHRDDFIESDLVTQASTLQQLIKFMHADPSNVNLKFGNFKGNRFGRKNGNIKLSKTDFIYESPTGLFKSIKHID

SEQ ID NO: 519 - protein, 1372 aa, Legionella pneumophila
MESSQILSPIGIDLGGKFTGVCLSHLEAFAELPNHANTKYSVILIDHNNFQLSQAQRRATRHRVRNKKRNQFVKRVALQLFQHILSRDLNAKEETALCHYLNNRGYTYVDTDLDEYIKDETTINLLKELLPSESEHNFIDWFLQKMQSSEFRKILVSKVEEKKDDKELKNAVKNIKNFITGFEKNSVEGHRHRKVYFENIKSDITKDNQLDSIKKKIPSVCLSNLLGHLSNLQWKNLHRYLAKNPKQFDEQTFGNEFLRMLKNFRHLKGSQESLAVRNLIQQLEQSQDYISILEKTPPEITIPPYEARTNTGMEKDQSLLLNPEKLNNLYPNWRNLIPGIIDAHPFLEKDLEHTKLRDRKRIISPSKQDEKRDSYILQRYLDLNKKIDKFKIKKQLSFLGQGKQLPANLIETQKEMETHFNSSLVSVLIQIASAYNKEREDAAQGIWFDNAFSLCELSNINPPRKQKILPLLVGAILSEDFINNKDKWAKFKNFWNTHKIGRTSLKSKCKEIEEARKNSGNAFKIDYEEALNHPEHSNNKALIKIIQTIPDIIQAIQSHLGHNDSQALIYHNPFSLSQLYTILETKRDGFHKNCVAVTCENYWRSQKTEIDPEISYASRLPADSVRPFDGVLARMMQRLAYEIAMAKWEQIKHIPDNSSLLIPIYLEQNRFEFEESFKKIKGGSSDKTLEQAIEKQNIQWEEKFQRIINASMNICPYKGASIGGQGEIDHIYPRSLSKKHFGVIFNSEANLIYCSSQGNREKKEEHYLLEHLSPLYLKHQFGTDNVSDIKNFISQNVANIKKYISFHLLTPEQQKAARHALFLDYDDEAFKTITKFLMSQQKARVNGTQKFLGKQIMEFLSTLADSKQLQLEFSIKQITAEEVHDHRELLSKQEPKLVKSRQQSFPSHAIDATLTMSIGLKEFPQFSQELDNSWFINHLMPDEVHLNPVRSKEKYNKPNISSTPLFKDSLYAERFIPVWVKGETFAIGFSEKDLFEIKPSNKEKLFTLLKTYSTKNPGESLQELQAKSKAKWLYFPINKTLALEFLHHYFHKEIVTPDDTTVCHFINSLRYYTKKESITVKILKEPMPVLSVKFESSKKNVLGSFKHTIALPATKDWERLFNHPNFLALKANPAPNPKEFNEFIRKYFLSDNNPNSDIPNNGHNIKPQKHKAVRKVFSLPVIPGNAGTMMRIRRKDNKGQPLYQLQTIDDTPSMGIQINEDRLVKQEVLMDAYKTRNLSTIDGINNSEGQAYATFDNWLTLPVSTFKPEIIKLEMKPHSKTRRYIRITQSLADFIKTIDEALMIKPSDSIDDPLNMPNEIVCKNKLFGNELKPRDGKMKIVSTGKIVTYEFESDSTPQWIQTLYVTQLKKQP

SEQ ID NO: 520 - protein, 907 aa, Leptospira inadai
MAKSIEEIRSIQNEFVVEYSILLKKIKKGEIDKKNDVYKVYQNTIKSSERLEQVLKERLGFQNVSKSYFNNPYSIAQLYNLISVDRSGFSKVCRSCQEENHWRSTLIDTDRGPQAQASKQVSDTGRPFDGQLAMLLDRIAFEIVKLKRIEIERLLSNKNSSKIEVVEIPLLIEENSFNFRYELAELKKLSKKKKDQLKKSVEEFDTKLNSKQERIKAASRELCPYTGKKISKGEIDHILPRSWTQKQFGTALNAEANLIYASREGNQSKGNREYGLNDLDEKYLNIIFGTKEVDSIQRNISDTIDRLDIERGTTRIVFDRLAPNERDCLRHALFIKSLRPKVFELLSGQLKARVNGTQLYLAKRIRSLLLKNQDFITKSLIIKVPSFSFYEPRTVDLPYMRKELAEKFPNLGKQNPQPTGSHIIDAAMVMAYAVETDSGNLSFGSKDKSEGFDSESLSRFLPSNIQFLSIKSKDKTDSKYPYKKPLFKDGVFGERFLPILIAEKGLRVGYTLENSLEVNSENPEEFFNVLKPYLLFKRKPIESNYQTLVAFAQKDKRGYIVLPVNKPKALESISQRKSDPHTSILKNILYTVSRESIPSLIFDKNTLIPEIKSNKVNWGDKLEKKFRIKIEIKLYGKKIADGFIRYPGKTEWEKLLLTEPLKGLVKNKTLTPKWFDSLENLAGLDDHFKDTSNPEAKHKRKSNHYALPVPKGPSGGFRIRRNSFDGYKVYQLYSVDGNSFHAFKIENGWTGKTLLLDIYQNSGNLHSLDYDYENTDISQTALFSKFYKIEFSKEETQKINSKGIKSLYVAPGSSSRQYIRVIFDKQTFSKFIKFQSKFWEFDLITPLPKDKAKDLIESILKIFPEDLRPKKPRNDIHIQNISHDSVQVEYIADGKTQGFGQYFINQN

SEQ ID NO: 521 - protein, 418 aa, Leptospira inadai
MILKSPIAIDLGAKNTGIVYTTYQPNALPTEIHGATIISDNLKLSQVDRRAKRHQRRNYTRMKLARRLVYLIIRYHYRIPEQDLTPEVKTSLQSLLTRRGYTFQSIETEGNELGQAPWGEIEDYFPNVQDYEKSLPIQTVLYHFFSSENLELNKLVPSKEPETKEDKNILKYIREQKEAFESEQNNGARHRLKYFEEIKEDFPRKIKLMECLQKNKIEEKKFLNLIQNISNLQIKPLRAYFNDKDMKEKEIWEPRRLHTYIARWIRSWHIDPKNSSKRLIRQKLLSQLENGKLKIIRDTSIYSPSKDIISFLEEIDPKDTIPPYEDQNNRHPPRCQNLWLDGKILDRYFPGWEQSLWKLIRNEKNNPFEQLITKDFRTDDTISEGKSLSEQIQIYERSHSNIKLDVRAVILQRFLDRS

SEQ ID NO: 522 - protein, 125 aa, Leptospira inadai
MSAYDRSANLDPWSLRLQGKAKKEIKTTESLSKTDLQKASDAYEKIKEILSESDTDQFIKLANRYYLEVADIKKGMWLPTAPERKHKEIPKSIAHEENQDISLFHKCNTKTGSKKRISQVSLEMF

SEQ ID NO: 523 - protein, 1355 aa, Leuconostoc gelidum
MTYSIGLDIGTGSVGWAVIGDDYRLKRAKGKNLIGVRLFDSATTAAERRGYRTTRRRLSRRHWRLRLLNDIFASDLAEQDENFLPRLKYSWVNPDDEQNPQLNSDVANGALFGSSETDKAFHKNYPTIYHLRHELMTDTAKHDLREVYLAIHHIVKYRGNFLNTADKINAENSFNVDLFIAALDEYNEFLETPITSIKDAQLFSDKLTDINARNKSVRVENAMSETYDDKSKIFKAILTALVGNTANFQTIFDLSDLEKDEAKNFKFKLDLEDVETKLDVVRAKLSDEQNAFLEAVLIAYDGITLKMILGDYKSISQSMIESYKSHQRDWKYIKNNVRLNEQKIEPDKNSVKFFKLDPKKLIYPSNLAYLQVISSNEDEHRKGLDYFKTAIQDADILQRIENDTFLPRQRTKRNGVLPYQLHLAELEQIIKKQSKYYPFLANIYTQDNKTENKLIGLLKFRVPYYVGPLVEAEKVTGDGKNHWLIKKELQENTPITPFNFDDVVDKDKSGEQFIKRITGTDSYLIGEPTLPENSLLYQKYNVLQELNNVRNERHQRLPIKVKQDIFEHVFKIDKNVNAKKVMAYLKLNGYGDFQIAGLSDTRTGKFNSNLSSYNYFVDLLGREKTEKIREDRLEEIIEIQTVFEDKILVAKRLSNLDFLTPQEKSKLSAKHYTGWGRLSQKLLTTQFIKTALSEAGDIIPQSHSIIDLLYYTDKNLMEILNDKTFNVRNWLTEQNKGTESGNSLYDQIDALAGPKDIKRGITQVFSIIDDIKKAMGSNPETVYLEFARETQTSRLTNSRLNRVQEIYNSPELKTEFAYLAKKLEAETKESIHDDRLYLYYLQEGRDMYTGKEIPFDQISSNYDIDHIIPQAFTKDDSLDNRVLVNRATNARKSNSPTFTNDIIDNRKSWWQSLVKRGLMSKEKFERLTDKRKTFSENQTNHFIARQLVETRQIIKNVADLIKNNYDGTQAVAIRASLTGEMRRYLDWPKNRDMNDYHHAHDALMMATVGKYVDRRGFFDNGSVSDGAGNAYNLYTKDWLVAARVGTRNDSQRVNPYGFIVGSMNSKAVRQQVNKETGEIVWGNENLDYLRHVLSYKKILVTRRLSGSSGRLYAETLFSPNPKAKLIAQKANRSVALYGGFTKAESAYTALVEFNKKGDRSYKLIKVPMAIANRVNDKQITVTAYIASLNLRDFSRVVLEHLPLGTLIRESDGSEFYAASSEYKHNAKELWAPKEILRSSKKLDKATADNLIDIFDFLTNDKTISNFKFYEKDLLHLKNVRDKFVEASDEIKIKVLSDVIYELHNDAGWRDPFKHIQEKPAWTMLQVKGGIKLSEKAAIVYQSPTGLFETITIVGE

SEQ ID NO: 524 - protein, 883 aa, Leuconostoc pseudomesenteroides
MIGVRLFEGADTAAERRGYRTTRRRLSRRRWRLRLLNDIFASELSKIDENFLPRLKYSWVNKNDTDNVHFGVGVFDNSEQEKAFYQDYPTIYHLRQKLMTDNRQHDLREVYLAIHHIVKYRGHFLNSGEISANSSFDAQKFLELLREFDNTFYPDAVKFLNLDQLDLPDKISSEISDSKISKSERVDRVLQHVQLANSGAKKILKAILNAVVGNSVDSVAMFSLSDLDKEEKKKINHPVTDSKPFKYSDKEVEAKLDELSNLLQDEQKIEFLSLLKLSFDGLTLKMLLGNAKSVSEAMVERYKVHKDDLKFIKENILNSFSKDKKKEFDKYYEAHLAEKDVDNVDKYFKKIIDDSIISKDKKIELLQKIDDHDFLPSQRSKINGAIPHQLHRNELDKIISQQSKYYPFLADSYTQNGKTETKLAGLVNFRVPYYVGPLVSKENADRNNPDGGQNHWVEFKENTSLSNLTPWNFNEIVDKDKSAAKFIERLTGMDTYLIGEPTLPQNSLLYQKYNVLQELNNIRVDNHKLDVKIKQDVFEHLFKTQNSVSAKDVKNYLIANGYAAPSIQITGLSDTNEKTFNSKLSSYNYLVDKLGRTFVESVKSDVLEKIIELQTVFEDKTVLLRQLSMISELTLAQANQLAEKHWTGWGRLSRKLLSSKVVDVNKITNSTFYPATSRQTIIDTLYHTQLNLMEIINNAEDLYGVRQWISEQNKSDSSDTNDVYDQIQELAGDKKIKRGITQSFRILDDIVKAMGGEPERVYLEFARENQQSGVSFSRKNLLSKLYENDSLKQTFKELKSQLESETKENLQNDRLYLYYLQQGRDMYSNDELNIDQLSSYDIDHIIPQAYTKDNSFDNRVLVSSKANRLKRMLLWYPVKLSKK

SEQ ID NO: 525 - protein, 468 aa, Leuconostoc pseudomesenteroides
MKDQGFISKRKFENLTRRGDFSEQQKERFIARALVETRQIIVNVSSLIDSHFNHTKAVAVKSNMTTDMRHYTKVPKNRDINDYHHAHDALFVATVGQYIENKGFMKAGKLSDSVGNEYNRYTKKWIETARKNTNYGRVNPFGFVVGSMQTATRGKLDYETGELKVVKNNYWSKDDLDYLLKVVSYKKILVTTKLQDNKGAMYDANLISAKGSGKKKAQLQISKSKNIDLYGGFNKLQNEYSVLILNHDEYRWLSIPMYARNSSEQYLHDKYPDAKVILNHILVGQPILLSNSSDPQKSKFASLRIATGGDYHNNFEFVPSVDVKKILDNIYLNHSVTDDEYKKVFESLLATLHDKFVFGIHQVMYNKIFDNKYLFDKMPDEAKRNVINSLLKFMNISKNQLGAVGKIGGKVNGVLYGFKTETEKGTSAGQLISNGKMQPHDIFIFQSPTGIFERRVTVAELANVIKDE

SEQ ID NO: 526 - protein, 1103 aa, Listeria innocua
LKLYPGEKSTGMFAQFISLIVGSKGNFQKPFDLIEKSDIECAKDSYEEDLESLLALIGDEYAELFVAAKNAYSAVVLSSIITVAETETNAKLSASMIERFDTHEEDLGELKAFIKLHLPKHYEEIFSNTEKHGYAGYIDGKTKQADFYKYMKTTLENIEGADYFIAKIEKENFLRKQRTFDNGAIPHQLHLEELEAILHQQAKYYPFLKENYDKIKSLVTFRIPYFVGPLANGQSEFAWLTRKADGEIRPWNIEEKVDFGKSAVDFIEKMTNKDTYLPKENVLPKHSLCYQKYLVYNELTKVRYINDQGKTSYFSGQEKEQIFNDLFKQKRKVKKKDLELFLRNMSHVESPTIEGLEDSFNSSYSTYHDLLKVGIKQEILDNPVNTEMLENIVKILTVFEDKRMIKEQLQQFSDVLDGVVLKKLERRHYTGWGRLSAKLLMGIRDKQSHLTILDYLMNDDGLNRNLMQLINDSNLSFKSIIEKEQVTTADKDIQSIVADLAGSPAIKKGILQSLKIVDELVSVMGYPPQTIVVEMARENQTTGKGKNNSRPRYKSLEKAIKEFGSQILKEHPTDNQELKNNRLYLYYLQNGKDMYTGQDLDIHNLSNYDIDHIVPQSFITDNSIDNLVLTSSAGNREKGNDVPPLEIVQKRKVFWEKLYQGNLMSKRKFDYLTKAERGGLTEADKARFIHRQLVETRQITKNVANILHQRFNYGKDDHGNTMKQVRIVTLKSALVSQFRKQFQLYKVRGVNDYHHAHDAYLNGVVANTLLKVYPQLEPEFVYGDYHQFDWFKANKATAKKQFYTNIMLFFAQKDRIIDENGEILWDKKYLDTVKKVMSYRQMNIVKKTEIQKGEFSKATIKPKGNSSKLIPRKTNWDPMKYGGLDSPNMAYAVVIEYAKGKNKLVFEKKIIRVTIMERKAFEKDEKAFLEEQGYRQPKVLAKLPKYTLYECEEGRRRMLASANEAQKGNQQVLPNHLVTLLHHAANCEVSDGKSLDYIESNREMFAELLAHVSEFAKRYTLAEANLNKINQLFEQNKEGDIKAIAQSFVDLMAFNAMGAPASFKFFETTIERKRYNNLKELLNSTIIYQSITGLYESRKRLDD

SEQ ID NO: 527 - protein, 1337 aa, Listeria innocua
MKNMKKPYTIGLDIGTNSVGWAVLTDQYDLVKRKMKIAGDSEKKQIKKNFWGVRLFDEGQTAADRRMARTARRRIERRRNRISYLQGIFAEEMSKTDANFFCRLSDSFYVDNEKRNSRHPFFATIEEEVEYHKNYPTIYHLREELVNSSEKADLRLVYLALAHIIKYRGNFLIEGALDTQNTSVDGIYKQFIQTYNQVFASGIEDGSLKKLEDNKDVAKILVEKVTRKEKLERILKLYPGEKSAGMFAQFISLIVGSKGNFQKPFDLIEKSDIECAKDSYEEDLESLLALIGDEYAELFVAAKNAYSAVVLSSIITVAETETNAKLSASMIERFDTHEEDLGELKAFIKLHLPKHYEEIFSNTEKHGYAGYIDGKTKQADFYKYMKMTLENIEGADYFIAKIEKENFLRKQRTFDNGAIPHQLHLEELEAILHQQAKYYPFLKENYDKIKSLVTFRIPYFVGPLANGQSEFAWLTRKADGEIRPWNIEEKVDFGKSAVDFIEKMTNKDTYLPKENVLPKHSLCYQKYLVYNELTKVRYINDQGKTSYFSGQEKEQIFNDLFKQKRKVKKKDLELFLRNMSHVESPTIEGLEDSFNSSYSTYHDLLKVGIKQEILDNPVNTEMLENIVKILTVFEDKRMIKEQLQQFSDVLDGVVLKKLERRHYTGWGRLSAKLLMGIRDKQSHLTILDYLMNDDGLNRNLMQLINDSNLSFKSIIEKEQVTTADKDIQSIVADLAGSPAIKKGILQSLKIVDELVSVMGYPPQTIVVEMARENQTTGKGKNNSRPRYKSLEKAIKEFGSQILKEHPTDNQELRNNRLYLYYLQNGKDMYTGQDLDIHNLSNYDIDHIVPQSFITDNSIDNLVLTSSAGNREKGDDVPPLEIVRKRKVFWEKLYQGNLMSKRKFDYLTKAERGGLTEADKARFIHRQLVETRQITKNVANILHQRFNYEKDDHGNTMKQVRIVTLKSALVSQFRKQFQLYKVRDVNDYHHAHDAYLNGVVANTLLKVYPQLEPEFVYGDYHQFDWFKANKATAKKQFYTNIMLFFAQKDRIIDENGEILWDKKYLDTVKKVMSYRQMNIVKKTEIQKGEFSKATIKPKGNSSKLISRKTNWDPMKYGGLDSPNMAYAVVIEYAKGKNKLVFEKKIIRVTIMERKAFEKDEKAFLEEQGYRQPKVLAKLPKYTLYECEEGRRRMLASANEAQKGNQQVLPNHLVTLLHHVANCEVSDGKSLDYIESNREMFAELLAHVSEFAKRYTLAEANLNKINQLFEQNKEGDIKAIAQSFVDLMAFNAMGAPASFKFFETTIERKRYNNLKELLNSTIIYQSITGLYESRKRLDD

SEQ ID NO: 528 - protein, 953 aa, Listeria ivanovii
MKKMLANIDGADYFIDQIEEENFLRKQRTFDNGTIPHQLHLEELEAILHQQAKYYPFLRKDYEKIRSLVTFRIPYFIGPLANGQSDFAWLTRKADGEIRPWNIEEKVDFGKSAIDFIEKMTNKDTYLPKENVLPKHSLCYQKYMVYNELTKIRYIDDQGKTHHFSGQEKQQIFNGLFKQQRKVKKKDLERFLYTINHIESPTIEGVEDAFNSSFATYHDLQKGGVTQEILDNPLNADMLEEIVKILTVFEDKRMIKEQLQSFSDVLDGTILKKLERRHYTGWGRLSAKLLTGIRDKHSHLTILDYLMNDDGLNRNLMQLINDSNLSFKSIIEKEQVSTADKGIQSIVAELAGSPAIKKGILQSLKIVDELVGIMGYPPQTIVVEMARENQTTGKGKNNSKPRFISLEKAIKEFGSQILKEHPTDNQCLKNDRLYLYYLQNGKDMYTGKELDIHNLSNYDIDHIIPQSFITDNSIDNRVLVSSTANREKGDNVPLLEVVRKRKAFWEKLYQAKLMSKRKFDYLTKAERGGLTEADKANFIQRQLVETRQITKNVANILYQRFNCKQDENGNEVEQVRIVTLKSTLVSQFRKQFQLYKVREVNDYHHAHDAYLNGVVANTLLKVYPQLEPEFVYGDYHQFDWFKANKATAKKQFYTNIMRFFAKENQIIDKNGEILWDNRYLDTIKKVLSYRQMNIVKKTEIQKGEFSNATVNPKGNSSKLISRKADWNPIKYGGFDGSNMAYSIVIEYEKRKKKTVIKKELIQINIMERVAFEKDQKAFLEEKGYYSPKVLTKIPKYTLYECENGRRRMLGSANEAQKGNQMVLPNHLMTLLYHAKNCEANDGESLAYIEMHREMFAELLAYISEFAKRYTLANDRLEKINMFFEQNKKGDIKVIAKSFDKLKVFNAFGAPRDFEFFETTIKRKRYYNIKELLNATIIYQSITGLYEARKRLED

SEQ ID NO: 529 - protein, 232 aa, Listeria ivanovii
MMSKLILGLDIGISSVGWGVLDESTNEVVDAGVRLFEEATRNGNEDRRGFRSARRLKRRRQHRLERAKGLIENNGFSCTDINKFNPYQARYNAIFGEVTKDELAAALFHLVKRRGTTIDAPEEEVKDVENELSTKMQLEKNAKKLATKYDYICEIQLEKLKENKVVRDHENRFRTEDYVKEARAILENQQEYYPEVTNEFIESYMALIETRRMYYDGPGSEKSPTPYGQYFI

SEQ ID NO: 530 - protein, 300 aa, Listeria monocytogenes
DDGLNRNLMQLINDSNLSFKSIIEKEQVSTTDKDLQSIVADLAGSPAIKKGILQSLKIVDELVSIMGYPPQTIVVEMARENQTTVKGKNNSRPRYKSLEKAIKEFGSQILKEHPTDNQELRNNRLYLYYLQNGKDMYTGQELDIHNLSNYDIDHIVPQSFITDNSIDNLVLTSSAGNREKGDDVPPLEIVRKRKVFWEKLFQGNLMSKRKFDYLTKAERGGLTEADKATFIHRQLVETRQITKNVANILHQRFNNETDNHGNNMEQVRIVMLKSALVSQFRKQFQLYKVREVNDYHHAHD

SEQ ID NO: 531 - protein, 782 aa, Listeria monocytogenes
IFNDLFKQKRKVKKKDLELFLRNINQIESPTIEGLEDSFNASYATYHDLLKVGMKQEILDNPLNTEMLEDIVKILTVFEDKRMIKEQLQQFSDVLDGVVLKKLERRHYTGWGRLSAKLLVGIRDKQSHLTILEYLMNDDGLNRNLMQLINDSNLSFKSIIEKEQVSTTDKDLQSIVADLAGSPAIKKGILQSLKIVDELVSIMGYPPQTIVVEMARENQTTVKGKNNSRPRYKSLEKAIKEFGSQILKEHPTDNQELKNNRLYLYYLQNGKDIYTGQELDIHNLSNYDIDHIVPQSFITDNSIDNLVLTSSAGNREKGDDVPPLEIVRKRKVFWEKLYQGNLMSKRKFDYLTKAERGGLTEADKARFIHRQLVETRQITKNVANILHQRFNNETDNHGNTMEQVRIVTLKSALVSQFRKQFQLYKVREVNDYHHAHDAYLNGVVANTLLKVYPQLEPEFVYGEYHQFDWFKANKATAKKQFYTNIMLFFAQKERIIDENGEILWDKKYLETIKKVLDYRQMNIVKKTEIQKGEFSKATIKPKGNSSKLIPRKENWDPMKYGGLDSPNMAYAVIIEHAKGKKKIVIEKKLIQINIMERKMFEKDEEAFLEEKGYRHPKVLTKLPKYTLYECEKGRRRMLASANEAQKGNQLVLSNHLVSLLYHAKNCEASDGKSLKYTEAHRETFSELLAQVSEFATRYTLADANLSKINNLFEQNKEGDIKXIAQSFVDLMVFNAMGAPASFKFFEATIDRKRYTNLKELLSSTIIYQSITGLYESRKRLDD

SEQ ID NO: 532 - protein, 1334 aa, Listeria monocytogenes; identical to SEQ ID NO: 114

SEQ ID NO: 533 - protein, 1334 aa, Listeria monocytogenes
MKNPYTIGLDIGTNSVGWAVLTDQYDLVKRKMKVAGNSDKKQIKKNFWGVRLFDDGQTAVDRRMNRTARRRIERRRNRISYLQEIFAVEMANIDANFFCRLNDSFYVDSEKRNSRHPFFATIEEEVAYHKNYRTIYHLREELVNSSEKADLRLVYLALAHIIKYRGNFLIEGALDTKNTSVDEVYKQFIQTYNQVFMSNIEEGALAKVEENTEVASILAGKFTRREKFERILRLYPGEKSTGMFAQFISLIVGNKGNFQKVFNLVEKTDIECAKDSYEEDLEALLAIIGDEYAELFVAAKNTYNAVVLSSIITVTATETNAKLSASMIERFDAHEKELGELKAFIKLHLPKQYQEIFNNAEIDGYAGYIDGKTKQVDFYKYLKTTLENVEGADYFITKIEEENFLRKQRTFDNGVIPHQLHLEELEAILHQQAKYYPFLREGYDKIKSLVTFRIPYFVGPLANGQSEFAWLTRKDDGEIRPWNIEEKVDFGKSAVDFIEKMTNKDTYLPKENVLPKHSLCYQKYMVYNELTKIRYIDDQGKTNYFSGREKQQIFNDLFKQKRKVKKKDLELFLRNINHIESPTIEGLEDSFNASYATYHDLLKVGLKQEILDNPLNTEILEDIVKILTVFEDKRMIKEQLEQFSDVLDGVVLKKLERRHYTGWGRLSAKLLVGIRDKQSHLTILDYLMNDDGLNRNLMQLINDSNLSFKSIIEKEQVSTTDKDLQSIVADLAGSPAIKKGILQSLKIVDELVSIMGYPPQTIVVEMARENQTTGKGKNNSKPRYKSLEKAIKDFGSQILKEHPTDNQELKNNRLYLYYLQNGKDIYTGQELDIHNLSNYDIDHIVPQSFITDNSIDNLVLTSSAGNREKGGDVPPLEIVRKRKVFWEKLYQGNLMSKRKFDYLTKAERGGLTEADKARFIHRQLVETRQITKNVANILHQRFNKETDNHGNTMEQVRIVTLKSALVSQFRKQFQLYKVREVNDYHHAHDAYLNGVVANTLLKVYPQLEPEFVYGEYHQFDWFKANKATAKKQFYTNIMLFFAQKERIIDENGEILWDKKYLETIKKVLDYRQINIVKKTEIQKGEFSKATIKPKGNSSKLIPRKENWDPMKYGGLDSPNMAYAVIIEHAKGKKKIVIEKKLIQINIMERKMFEKDEEAFLEEKGYHQPKVLTKLPKYTLYECEKGRRRMLSSANEAQKGNQLVLSNHLVSLLYHAKNCEASDGKSLKYIEAHRETFSELLAQVSEFATKYTLADANLSKINNLFEQNKEGDIKAIAQSFVDLMAFNAMGAPASFKFFEATIDRKRYTNLKELLSSTIIYQSITGLYESRKRLDD

SEQ ID NO: 534 - protein, 1334 aa, Listeria monocytogenes
MKNPYTIGLDIGTNSVGWAVLTDQYDLVKRKMKVAGNSDKKQIKKNFWGVRLFDDGQTAVDRRMNRTARRRIERRRNRISYLQEIFAVEMANIDANFFCRLNDSFYVDSEKRNSRHPFFATIEEEVAYHKNYRTIYHLREELVNSSEKADLRLVYLALAHIIKYRGNFLIEGALDTKNTSVDEVYKQFIQTYNQVFMSNIEEGALAKVEENTEVASILAGKFTRREKFERILRLYPGEKSTGMFAQFISLIVGNKGNFQKVFNLVEKTDIECAKDSYEEDLEALLAIIGDEYAELFVAAKNTYNAVVLSSIITVTATETNAKLSASMIERFDAHEKELGELKAFIKLHLPKQYQEIFNNAEIDGYAGYIDGKTKQVDFYKYLKTTLENVEGADYFITKIEEENFLRKQRTFDNGVIPHQLHLEELEAILHQQAKYYPFLREGYDKIKSLVTFRIPYFVGPLANGQSEFAWLTRKDDGEIRPWNIEEKVDFGKSAVDFIEKMTNKDTYLPKENVLPKHSLCYQKYMVYNELTKIRYIDDQGKTNYFSGREKQQIFNDLFKQKRKVKKKDLELFLRNINHIESPTIEGLEDSFNASYATYHDLLKVGLKQEILDNPLNTEILEDIVKILTVFEDKRMIKEQLEQFSDVLDGVVLKKLERRHYTGWGRLSAKLLVGIRDKQSHLTILDYLMNDDGLNRNLMQLINDSNLSFKSIIEKEQVSTTDKDLQSIVADLAGSPAIKKGILQSLKIVDELVSIMGYPPQTIVVEMARENQTTGKGKNNSKPRYKSLEKAIKDFGSQILKEHPTDNQELKNNRLYLYYLQNGKDIYTGQELDIHNLSNYDIDHIVPQSFITDNSIDNLVLTSSAGNREKGGDVPPLEIVRKRKVFWEKLYQGNLMSKRKFDYLTKAERGGLTEADKARFIHRQLVETRQITKNVANILHQRFNKETDNHGNTMEQVRIVTLKSALVSQFRKQFQLYKVREVNDYHHAHDAYLNGVVANTLLKVYPQLEPEFVYGEYHQFDWFKANKATAKKQFYTNIMLFFAQKERIIDENGEILWDKKYLETIKKVLDYRQINIVKKTEIQKGEFSKATIKPKGNSSKLIPRKENWDPVKYGGLDSPNMAYAVIIEHAKGKKKIVIEKKLIQINIMERKMFEKDEEAFLEEKGYHQPKVLTKLPKYTLYECEKGRRRMLSSANEAQKGNQLVLSNHLVSLLYHAKNCEASDGKSLKYIEAHRETFSELLAQVSEFATKYTLADANLSKINNLFEQNKEGDIKAIAQSFVDLMAFNAMGAPASFKFFEATIDRKRYTNLKELLSSTIIYQSITGLYESRKRLDD

SEQ ID NO: 535 - protein, 1099 aa, Listeria monocytogenes
MKNPYTIGLDIGTNSVGWAVLTDQYDLVKRKMKVAGNSDKKQIKKNFWGVRLFDDGQTAVDRRMNRTARRRIERRRNRISYLQEIFAVEMANIDANFFCRLNDSFYVDSEKRNSRHPFFATIEEEVAYHKNYRTIYHLREELVNSSEKADLRLVYLALAHIIKYRGNFLIEGALDTKNTSVDEVYKQFIQTYNQVFMSNIEEGALAKVEENTEVASILAGKFTRREKFERILRLYPGEKSTGMFAQFISLIVGNKGNFQKVFNLVEKTDIECAKDSYEEDLEALLAIIGDEYAELFVAAKNTYNAVVLSSIITVTATETNAKLSASMIERFDAHEKELGELKAFIKLHLPKQYQEIFNNAEIDGYAGYIDGKTKQVDFYKYLKTTLENVEGADYFITKIEEENFLRKQRTFDNGVIPHQLHLEELEAILHQQAKYYPFLREGYDKIKSLVTFRIPYFVGPLANGQSEFAWLTRKDDGEIRPWNIEEKVDFGKSAVDFIEKMTNKDTYLPKENVLPKHSLCYQKYMVYNELTKIRYIDDQGKTNYFSGREKQQIFNDLFKQKRKVKKKDLELFLRNINHIESPTIEGLEDSFNASYATYHDLLKVGLKQEILDNPLNTEILEDIVKILTVFEDKRMIKEQLEQFSDVLDGVVLKKLERRHYTGWGRLSAKLLVGIRDKQSHLTILDYLMNDDGLNRNLMQLINDSNLSFKSIIEKEQVSTTDKDLQSIVADLAGSPAIKKGILQSLKIVDELVSIMGYPPQTIVVEMARENQTTGKGKNNSKPRYKSLEKAIKDFGSQILKEHPTDNQELKNNRLYLYYLQNGKDIYTGQELDIHNLSNYDIDHIVPQSFITDNSIDNLVLTSSAGNREKGGDVPPLEIVRKRKVFWEKLYQGNLMSKRKFDYLTKAERGGLTEADKARFIHRQLVETRQITKNVANILHQRFNKETDNHGNTMEQVRIVTLKSALVSQFRKQFQLYKVREVNDYHHAHDAYLNGVVANTLLKVYPQLEPEFVYGEYHQFDWFKANKATAKKQFYTNIMLFFAQKERIIDENGEILWDKKYLETIKKVLDYRQINIVKKTEIQKGEFSKATIKPKGIPAN

SEQ ID NO: 536 - protein, 1334 aa, Listeria monocytogenes
MKNPYTIGLDIGTNSVGWAVLTDQYDLVKRKMKVAGNSDKKQIKKNFWGVRLFDEGETAADRRMNRTARRRIERRRNRISYLQEIFALEMANIDANFFCRLNDSFYVDSEKRNSRHPFFATIEEEVAYHKNYRTIYHLREELVNSSEKADLRLVYLALAHIIKYRGNFLIEGALDTKNTSVDGVYKQFIQTYNQVFISNIEEGTLAKMEENTTVADILAGKFTRKEKLERILQLYPGEKSTGMFAQFISLIVGSKGNFQKVFDLVEKTDIECAKDSYEEDLEALLAIIGDEYAELFVAAKNTYNAVVLSSIITVTDTETNAKLSASMIERFDAHEKDLSELKAFIKLHLPKQYEEIFSNVAIDGYAGYIDGKTKQVDFYKYLKTLLENIEGADYFIAKIEEENFLRKQRTFDNGAIPHQLHLEELEAILHQQAKYYPFLKEAYDKIKSLVTFRIPYFVGPLANGQSDFAWLTRKADGEIRPWNIEEKVDFGKSAVDFIEKMTNKDTYLPKENVLPKHSLYYQKYMVYNELTKVRYIDDQGKTNYFSGQEKQQIFNDYFKQKRKVSKKDLEQFLRNMSHIESPTIEGLEDSFNSSYATYHDLLKVGIKQEVLENPLNTEMLEDIVKILTVFEDKRMIKEQLQQFSDVLDGAVLKKLERRHYTGWGRLSAKLLVGIRDKQSHLTILDYLMNDDGLNRNLMQLINDSNLSFKSIIEKEQVSTTDKDLQSIVADLAGSPAIKKGILQSLKIVDELVSIMGYPPQTIVVEMARENQTTVKGKNNSRPRYKSLEKAIKEFGSQILKEHPTDNQELRNNRLYLYYLQNGKDMYTGQELDIHNLSNYDIDHIVPQSFITDNSIDNLVLTSSAGNREKGDDVPPLEIVRKRKVFWEKLFQGNLMSKRKFDYLTKAERGGLTEADKATFIHRQLVETRQITKNVANILHQRFNNETDNHGNNMEQVRIVMLKSALVSQFRKQFQLYKVREVNDYHHAHDAYLNGVVANTLLKVYPQLEPEFVYGEYHQFDWFKANKATAKKQFYTNIMLFFAQKERIIDENGEILWDKKYLETIKKVLDYRQMNIVKKTEIQKGEFSKATIKPKGNSSKLIPRKENWDPMKYGGLDSPNMAYAVIIEHAKGKKKVVFEKKIIRITIMERKAFEKDEKSFLEKQGYRQPKVLTKLPKYTLYECENGRRRMLASANEAQKGNQQVLKGQLITLLHHAKNCEASDGKSLDYIESNREMFGELLAHVSEFAKRYTLADANLSKINQLFEQNKDNDIKVIAQSFVNLMAFNAMGAPASFKFFEATIERKRYTNLKELLSATIIYQSITGLYEARKRLDG

SEQ ID NO: 537 - protein, 1334 aa, Listeria monocytogenes
MKNPYTIGLDIGTNSVGWAVLTNQYDLVKRKMKVAGNSDKKQIKKNFWGVRLFDDGQTAVDRRMNRTARRRIERRRNRISYLQEIFAVEMANIDANFFCRLNDSFYVDSEKRNSRHPFFATIEEEVAYHKNYRTIYHLREELVNSSEKADLRLVYLALAHIIKYRGNFLIEGALDTKNTSVDGVYEQFIQTYNQVFMSNIEEGTLAKVEENIEVANILAGKFTRREKFERILQLYPGEKSTGMFAQFISLIVGSKGNFQKVFDLIEKTDIECAKDSYEEDLEALLAIIGDEYAELFVAAKNTYNAVVLSSIITVTATETNAKLSASMIERFDAHEKDLGELKAFIKLHLPKQYQEIFNNAAIDGYAGYIDGKTKQVDFYKYLKTILENIEGADYFIAKIEEENFLRKQRTFDNGAIPHQLHLEELEAIIHQQAKYYPFLREDYEKIKSLVTFRIPYFVGPLAKGQSEFAWLTRKADGEIRPWNIEEKVDFGKSAVDFIEKMTNKDTYLPKENVLPKHSLCYQKYMVYNELTKVRYIDDQGKTNYFSGQEKQQIFNDLFKQKRKVKKKDLELFLRNINHIESPTIEGLEDSFNASYATYHDLLKVGMKQEILDNPLNTEMLEDIVKILTVFEDKPMIKEQLQQFSDVLDGGVLKKLERRHYTGWGRLSAKLLVGIREKQSHLTILDYLMNDDGLNRNLMQLINDSNLSFKSIIEKEQVSTTDKDLQSIVADLAGSPAIKKGILQSLKIVDELVSIMGYPPQTIVVEMARENQTTGKGKNNSKPRYKSLEKAIKEFGSKILKEHPTDNQELKNNRLYLYYLQNGKDMYTGQELDIHNLSNYDIDHIVPQSFITDNSIDNLVLTSSAGNREKGGDVPPLEIVRKRKVFWEKLYQGNLMSKRKFDYLTKAERGGLTDADKARFIHRQLVETRQITKNVANILHQRFNNETDNHGNTMEQVRIVTLKSALVSQFRKQFQLYKVREVNDYHHAHDAYLNGVVANTLLKVYPQLEPEFVYGEYHQFDWFKANKATAKKQFYTNIMLFFGQKERIIDENGEILWDKKYLETIKKVLDYRQMNIVKKTEIQKGEFSKATIKPKGNSSKLIPRKENWDPMKYGGLDSPNMAYAVIIEHAKGKKKLIFEKKIIRITIMERKMFEKDEEAFLEEKGYRHPKVLTKLPKYTLYECEKGRRRMLASANEAQKGNQLVLSNHLVSLLYHAKNCEASDGKSLKYIEAHRETFSELLAQVSEFATRYTLADANLSKINNLFEQNKEGDIQAIAQSFVDLMAFNAMGAPASFKFFEATIDRKRYTNLKELLSSTIIYQSITGLYESRKRLDD

SEQ ID NO: 538 - protein, 874 aa, Listeria seeligeri; identical to SEQ ID NO: 180

SEQ ID NO: 539 - protein, 1087 aa, unidentified
  source 1..1087: note = Listeriaceae
MKKLVLGLDIGVASVGWGIIDAENGDVVDTGVRLFSSRDASENESRRTSRQSRRLSRRKKHRRERIKQLLLAHDMDICDIVNENPYELRVKGLNEKLEVSEIYVALTHLAKRRGVSYLDDVVEEGGTIKSEHLNKNMEEIKSGKMPCEIQLERFEKYGQVRGMIEINQDTEESSFLVNIFRTSDYIKEAKTILATQQKFHKQITNEFIDEYIHIMASKRDYFIGPGNEKSRTDYGVYRTNGDTWDNLFEILIGKCSVFPEETRAARSSYVAQEFNLLNDLNNLKISNLESGKLSASQKHDIVEKVKNSKKFGTKDLLKYIASVCECKIEDIGGCRVDKNRKPIMHTFENYRKVHNALNEAGVDLRLSETDYDELMKIMTLNSETLEIKKQCKEKLPQLTEDYLNVCLVLNKKGAFSGWHALSLKAMKLMMPELYGTSKNQMQIIHTMQLGKAYLKPLNQQKYLNSEAILEEIYNPIAARSIRQTIKVTNAILKKYGHLDSVIIEMPRDYQTSEDERKMIEKMQKENEKEKKAALKRAREEYPFPDEAFRNHKELATKLRLWYQQDQFCVYSGRKISVVDLVRNPNQFEIDHIIPQSVSLDDSLNNKVLCFSEENQKKGQQTPFYYHKGKSGNWTYEQYKLFVEKLFDKKKISNKKRELLLFEEDINKWDVRRGFIARNLVDTRYASRVILNSYQQYFGNHEMGTKVKVVRGKFTSQLRKKWRIFKDRNESHSHHAIDALIVAATANLRLWKKNTLGVSDEGKVYDKETGEILPFEKLTESEYNEMMNKEPYLNFKTKLQNIETKVKYSYRVSKKVNRKISDATIYSTRERDGIDYIVGKIKNIYDVKTYKDQFLKRYKKNKEQFLMYQHDPQTFAILENIMATYQDAENPFLAYKKEYGVIRKYSKKGGGSPVTSLKFIDKVLGQKIDLTAKNQAALPKNKKVVLQSITPYRADVYYDEIDKRYHLIGVKYSLFSFSKQGYVINPIAYQKLLEKEQIHSEMKFCFSLYREDIIEFGEDPDSLTRYRFWSKNESGKNKIEVKPIEKPNFEKQTVLTITKKIKILNKYQTDVLGNSFKAQEEKDPRNIE

SEQ ID NO: 540 - protein, 1345 aa, Marinilabilia sp.
MKKILGLDLGTTSIGWAFIKEPEKDVVGSEIVDMGVRIVALSSDEENDFAKGNTISINADRTLKRGARRNLQRFKLRRDALLEIFKEMKLIPSNFKYAEDGPSSTFSTLKLRDKAAKEKIELDDLVKVLLQINKKRGYRSSRKAKSEEDDGSAIDSMGIAKELYENDLTPGQWVFEALQKGRKNVPDFYRSDLQEEFKKIVNYQSEFYPDVLNSSFVEDWMGKASTPTKQYFNKKGVHLAENKGKREERRLQEYNWRAVAVNSKIDLSEIALILSQINSQISNSSGYLGAISDRSKELYFKNQTVGQYLYQQIKINPHTRLKGQVFYRQDYLDEFEKIWSVQSGFHPQLNDALKKEIRDITIFFQRRLKSQKHLISNCEFEDYHKVVPKSHPIFQEFRIWQNLNNLTLIKKDNLNEKSELALEDKIALANELAFKREQSVKDALNILGLKSSEWEFNFTKIEGNRTNHAFFEAFAKIIEIEDGEPLDLGNLKADDILDQFSEAFLRIGIDPGLLQVNNDIEGPNYEKQPYIQFWHLLYSSEDDQKLKQNLIKKFGFKPDHAKILASISLQDDHASLSSRAIKKILPHLQSGLIYDKACTYAGYNHSSSFTKEENEKRELSSELDLLKKNSLRNPVVEKILNQMINVVNAILKDPNLGKPDEIRVEMARELKANAEQRKNMTSNIASATRDHEKYREILKKEFGLKRVTKNDLLRYKLWLETDGISLYTGKPIEASKLFSKEYDIEHIIPKTRLFDDSFSNKTICERQLNIDKANVTAFSFLQNKLSGDEFEQYQSRVKSLFGKLSKAKIQKLLMANDKIPEDFIARQLQETRYISKKAKEILFEITRRVSVTTGTITDKLREDWGLVEIMKELNWEKYDKLGLTYTIEGKHGERLNKIKDWSKRNDHRHHAMDALTVALTKPAYIQYLNNLNAKELNGKKSTEIFAIEQKYLKRENGKLCFIPPVENIRTEAKKHLSKVLISYKAKNKVVTINKNRTNKKAGFNEQIALTPRGQLHKETVYGKAFHYSTKFEKIGASFDVQKINAVAKKEEREALLKRLAENGDDPKKAFTGKNSLSKMPIYLDLKRNIKLPEKVKTVVLEQNYTIRKNIDPDLKLDKVIDVGVKRILENRLKEFGGNAKLALSNLDENPIWLNKEKGITIKRVKISGVSNVESLHVKKDHFGEPILDQVGNEIPVDFVSTGNNHHVAIYEDEKGNLQEEVVSFFEAVVRQNQGLPIINKNHSLGWKFLFTLKQNEYFVFPSDDFDPTDVDLMDEENYHLISPNLFRVQKFTTKDYFFRHHLETTVEDKSELKGVSFKRLGLPGLNCIKKIRINHLGKIIQVGEY

SEQ ID NO: 541 - protein, 1091 aa, Mobiluncus mulieris
MDSRKYRVGIDVGTNSVGFAAVEEDDSGSPTRFLNTMVVIHDSGVDSEQKKYAITRLASAGTARRTRRLYRTRRQRLRELDDFISNELGYPLVNLENFADPYEPWKVRADLATTKLPNDELPEAMSIALRHMARHRGWRSPYQRVEALHLHAEISKEFAALKERVVEKTGDVFSDDATPAEVLVDLMGRQKVRGADGVLSGKLRQSDNANELRKIASVQGIDDETLNRIIDRVFSSKSPKGKASERVGMDALPGQGSKPRALKAMPSFQKFRVVSVICNLRIKDSGGDARPLSMEEKEKLIDYLMSSTTDDHVTWTDVADLLHVKRSQLQGTAKEGFDGERPYTRPPVNSTWSKIKDSKIKSLVALWKTGDVDVQSAIVEALSNASVLEDSRPGADIVVAYLESLDDKELESLDKVGLPAGRASYSEDSLERLTERMLRDDCDLFEARKREFNVADDWKPPADPIYAPVGNPGVDRVLKIVNRLLMAAEREWGAPTQINIEHVRSGFSSELMQREFERENERRRAQNEEAVKAILTEKGGNSRVSKYDITRYYAVKRQHCQCLYCGTPITFSDCELDHIVPRKGVGSTNTRVNLAAACRSCNRDKSNLPFAVWAGKASNFDVSIDDAVSRVKQWQRSQNEGVREFRAFQNEVISRLLKTTEDPEIDSRSLESVAWMARELHHRVEYYFQSKGAQTQVSVYRGAVTAQARKSSGLEDKVKMIGGGGKTRLDRRHHAMDAATIALMTPGISTTLSEKNNLRDAQKFTGQSETWKDYCGRTETARKHFAVWKSNMERLTDLFNDKLENDAIPVVQPLRLRLSNSKAHDDGIGKLDSKKLGSVWSLADIDRAATPQIWTALTRCDDFDPTKGLPENANRVIRAQGVKYESEDNIPVFPSNVAAIAVRDGYAEIGSTIHHARIYRIDDGKKTFYSMIRVFAVDLLKHQAEDLFTVKLPPSAISIRTCEDSLRRALSNGTAEYLGWLVPGDEIIVDTSDKAFHTGQIGDLLRNFPVNSFRLTGFPSNSRLRLKPVLLAGEGLRDDAEDSIKKILLGQGWRPAINVLFSKGKPRIVRRNSLGIERPSSNNGLPFSWEA

SEQ ID NO: 542 - protein, 1233 aa, Mycoplasma canis
MEKKRKVTLGFDLGIASIGWAIVDSETNQVYKLGSRLFDAPDTNLERRTQRGTRRLLRRRKYRNQKFYNLVKRTEVFGLSSREAIENRFRELSIKYPNIIELKTKALSQEVCPDEIAWILHDYLKNRGYFYDEKETKEDFDQQTVESMPSYKLNEFYKKYGYFKGALSQPTESEMKDNKDLKEAFFFDFSNKEWLKEINYFFNVQKNILSETFIEEFKKIFSFTRDISKGPGSDNMPSPYGIFGEFGDNGQGGRYEHIWDKNIGKCSIFTNEQRAPKYLPSALIFNFLNELANIRLYSTDKKNIQPLWKLSSIDKLNILLNLFNLPISEKKKKLTNANINDIVKKESTKSIMLSVEDIDMIKDEWAGKEPNVYGVGLSGLNIEESAKENKFKFQDLKILNVLINLLDNVGIKFEFKDRNDIIKNLELLDNLYLFLIYQKESNNKDSSIDLFIAKNELLNIENLKLKLKEFLLGAGNEFENHNSKTHSLSKKAIDAILPKLLDNNEGWNLEAIKNYDEEIKSQIEDNSSLMAKQDKKYLNDNFLKDAILPPNVKVTFQQAILIFNKIIQKFSKDFEIDKVVIELAREMTQDQENDALKGIAKAQKSKKSLVEERLEANNIDKSVFNDKYEKLIYKIFLWISQDFKDPYTGAQISTNEIVNNKVEIDHIIPYSLCFDDSSANKVLVHKQSNQEKSNSLPYEYIKQGHSGWNWDEFTKYVKRVFVNNVDSILSKKERLKKSENLLTTSYDGYDKLGFLARNLNDTRYATILFRDQLNNYAEHHLIDNKKMFKVIAMNGAVTSFIRKNMSYDNKLRLKDRSDFSHHAYDAAIIALFSNKTKTLYNLIDPSLNGIISKRSEGYWVIEDRYTGEIKELKKEDWTSIKNNVQARKIAKEIEEYLIDLDDEVFFSRKTKRKTNRQLYNETIYGIAAKTDEDGITNYYKKEKFSILDDKDIYLRLLREREKFVINQSNPEVIDQIIEIIESYGKENNIPSRDEAINIKYTKNKINYNLYLKQYMRSLTKSLDQFSEEFINQMIANKTFVLYNPTKNTTRKIKFLRLVNDVKINDIRKNQVINKFNGKNNEPKAFYENINSLGAIVFKNSANNFKTLSINTQIAIFGDKNWDIEDFKTYNMEKIEKYKEIYGIDKTYNFHSFIFPGTILLDKQNKEFYYISSIQTVRDIIEIKFLNKIEFKDENKNPDTSKTPKRLMFGIKSIMNNYEQVDISPFGINKKIFE

SEQ ID NO: 543 - protein, 1233 aa, Mycoplasma canis
MEKKRKVTLGFDLGIASVGWAIVDSETNQVYKLGSRLFDAPDTNLERRTQRGTRRLLRRRKYRNQKFYNLVKRTEVFGLSSREAIENRFRELSIKYPNIIELKTKALSQEVCPDEIAWILHDYLKNRGYFYDEKETKEDFDQQTIESMPSYKLNEFYKKYGYFKGALSQPTESEMKDNKDLKEAFFFDFSNKEWLKEINYFFNVQKNILSETFIEEFKKIFSFTRDISKGPGSDNMPSPYGIFGEFGDNGQGGRYEHIWDKNIGKCSIFTNEQRAPKYLPSALIFNFLNELANIRLYSTDKKNIQPLWKLSSIDKLNILLNLFNLPISEKKKKLTSANINDIVKKESTKSIMLSVEDIDMIKDEWAGKEPNVYGVGLSGLNIEESAKENKFKFQDLKILNVLINLLDNVGIKFEFKDRNDIIKNLELLDNLYLFLIYQKESNNKDSSIDLFIAKNESLNIENLKLKLKEFLLGAGNEFENHNSKTHSLSKKAIDAILPKLLDNNEGWNLEAIKNYDEEIKSQIEDNSFLMAKQDKKYLNDNFLKDAILPPNVKVTFQQAILIFNKIIQKFSKDFEIDKVVIELAREMTQDQENDALKGIAKAQKSKKSLVEERLEANNIDKSVFNEKYEKLIYKIFLWISQDFKDPYTGAKISANEIVDNKVEIDHIIPYSLCFDDSSANKVLVHKQSNQEKSNSLPYEYIKQGHSGWNWDEFTKYVKRVFVNNVDSILSKKERLKKSENLLTTSYDGYDKLGFLARNLNDTRYATILFRDQLNNYAEHHLIDDKKMFKVIAMNGAVTSFIRKNMSYDNKLRLKNRNDFSHHAYDAAIIALFSNKTKTLYNLIDPSLNGIISKRSEGYWVIEDRYTGEIKELKKEDWTSIKNNVQARKIAKEIEEYLIDLDDEVFFSRKTKRKTNRQLYNETIYGIAAKTDEDGITNYYKKEKLSILDDKDIYLRLLREREKFVINQSNPEVIDQIIEIIESYGKENNIPSRDEAINIKYTKNKINYNLYLKQYMRSLTKSLDQFSEEFINQMIANKTFVLYNPTKNTTRKIKFLRLVNDVKINDIRKNQVINKFNGKNNEPKAFYENINSLGAIVFKNSANNFKTLSINTQIAIFGDKNWDIEDFKTYNMEKIEKYKEIYGIDKTYNFHSFIFPGTILLDKQNKEFYYISSIQTVRDIIEIKFLNKIEFKDENKNQDTSKTPKRLMFGIKSIMNNYEQVDISPFGINKKIFE

SEQ ID NO: 544 - protein, 1233 aa, Mycoplasma canis; identical to SEQ ID NO: 247

SEQ ID NO: 545 - protein, 1233 aa, Mycoplasma canis
MEKKRKVTLGFDLGIASVGWAIVDSETNQVYKLGSRLFDAPDTNLERRTQRGTRRLLRRRKYRNQKFYNLVKRTEVFGLSSREAIENRFRELSIKYPNIIELKTKALSQEVCPDEIAWILHDYLKNRGYFYDEKETKEDFDQQTVESMPSYKLNEFYKKYGYFKGALSQPTESEMKDNKDLKEAFFFDFSNKEWLKEINYFFNVQKNILSETFIEEFKKIFSFTRDISKGPGSDNMPSPYGIFGEFGDNGQGGRYEHIWDKNIGKCSIFTNEQRAPKYLPSALIFNFLNELANIRLYSTDKKNIQPLWKLSSVDKLNILLNLFNLPISEKKKKLTSTNINDIVKKESIKSIMISVEDIDMIKDEWAGKEPNVYGVGLSGLNIEENAKENKFKFQDLKILNVLINLLDNVGIKFEFKDRNDIIKNLELLDNLYLFLIYQKESNNKDSSIDLFIAKNKSLNIENLKLKLKEFLLGAGNEFENHNSKSHSLSKKAIDAILPKLLDNNEGWNLEAIKNYDEEIKSQIEDNSSLMAKQDKKYLNDNFLKDAILPPNVKVTFQQAILIFNKIIQKFSKDFEIDKVVIELAREMTQDQENDALKGMAKAQKSKKSLVEERLEANNIDKSVFNDKYEKLIYKIFLWISQDFKDPYTGAQISVNEIVNNKVEIDHIIPYSLCFDDSSANKVLVHKQSNQEKSNSLPYEYIKQGHSGWNWDEFTKYVKRVFVNNVDSILSKKERLKKSENLLTTSYDGYDKLGFLARNLNDTRYATILFRDQLNNYAEHHLIDNKKMFKVIAMNGAVTSFIRKNMSYDNKLRLKDRSDFSHHAYDAAIIALFSNKTKTLYNLIDPSLNGIISKRSEGYWVIEDRYTGEIKELKKEDWTSIKNNVQARKIAKEIEEYLIDLDDEVFFSRKTKRKTNRQLYNETIYGIAAKTDEDGITNYYKKEKFSILDDKDIYLRLLREREKFVINQSNPEVIDQIIEIIESYGKENNIPSRDEAINIKYTKNKINYNLYLKQYMRSLTKSLDKFSEEFINQMIANKTFVLYNPTKNTTRKIKFLRLVNDVKINDIRKNQVINKFNGKNNEPKAFYENINSLGAIVFKNSANNFKTLSINTQIAIFGDKNWDIEDFKTYNMEKIEKYKEIYGIDKTYNFHSFIFPGTILLDKQNKEFYYISSIQTVRDIIEIKFLNKIEFKDENKNQDTSKTPKRLMFGIKSIMNNYEQVDISPFGINKKIFE

SEQ ID NO: 546 - protein, 1233 aa, Mycoplasma canis
MEKKRKVTLGFDLGIASVGWAIVDSETNQVYKLGSRLFDAPDTNLERRTQRGTRRLLRRRKYRNQKFYNLVKRTEVFGLSSREAIENRFRELSIKYPNIIELKTKALSQEVCPDEIAWILHDYLKNRGYFYDEKETKEDFDQQTVESMPSYKLNEFYKKYGYFKGALSQPTESEMKDNKDLKEAFFFDFSNKEWLKEINYFFNVQKNILSETFIEEFKKIFSFTRDISKGPGSDNMPSPYGIFGEFGDNGQGGRYEHIWDKNIGKCSIFTNEQRAPKYLPSALIFNFLNELANIRLYSTDKKNIQPLWKLSSVDKLNILLNLFNLPISEKKKKLTSTNINDIVKKESIKSIMLSVEDIDMIKYEWAGKEPNVYGVGLSGLNIEESAKENKFKFQDLKILNVLINLLDNVGIKFEFKDRNDIIKNLELLDNLYLFLIYQKESNNKDSSIDLFIAKNKSLNIENLKLKLKEFLLGAGNEFENHNSKTHSLSKKAIDAILPKLLDNNEGWNLEAIKNYDEEIKSQIEDNSSLMAKQDKKYLNDNFLKDAILPPNVKVTFQQAILIFNKIIQKFSKDFEIDKVVIELAREMTQDQENDALKGIAKAQKSKKSLVEERLEANNIDKSVFDDKYEKLIYKIFLWISQDFKDPYTGAKISANEIVNNKVEIDHIIPYSLCFDDSSANKVLVHKQSNQEKSNSLPYEYIKQGHSGWNWDEFTKYVKRVFVNNVDSILSKKERLKKSENLLTTSYDGYDKLGFLARNLNDTRYATILFRDQLNNYAEHHLIDNKKMFKVIAMNGAVTSFIRKNMSYDNKLRLKDRSDFSHHAYDAAIIALFSNKTKTLYNLIDPSLNGIISKRSEGYWVIEDRYTGEIKELKKEDWTSIKNNVQARKIAKEIEEYLIDLDDEVFFSRKTKRKTNRQLYNETIYGIAAKTDEDGITNYYKKEKFSILDDKDIYLRLLREREKFVINQSNPEVIDQIIEIIESYGKENNIPSRDEAINIKYTKNKINYNLYLKQYMRSLTKSLDQFSEEFINQMIANKTFVLYNPTKNTTRKIKFLRLVNDVKINDIRKNQVINKFNGKNNEPKAFYENINSLGAIVFKNSANNFKTLSINTQIAIFGDKNWDIEDFKTYNMEKIEKYKEIYGIDKTYNFHSFIFPGTILLDKQNKEFYYISSIQTVRDIIEIKFLNKIEFKDENKNQDTSKTPKRLMFGIKSIMNNYEQVDISPFGINKKIFE

SEQ ID NO: 547 - protein, 1239 aa, Mycoplasma cynos
MEEKRKVTLGFDLGVASVGWAIVDSETNEVYKLGSRLFDIPDTNIDRRAKRGSRRLVRRRSYRNQKFYNLIKRTKTFGFLDKEAIEKEFVLLSIKYPNIIELKVKGLQEEVSKSEAVWILHDYLKNRGYFYDDKEEKDDLENPSIESMPSYKLYEFYKEYGYFKGALSSPTESEKNKDSDLEKAIFFNFSNKEWTKEINHFFKIQKNIFSEDFKAKFMEFFSFIRDISKGPGSENMPSQYSIFGKYGDDGMGGKYQHIWDKNIGKCSIFKDKVRAPKYLPSALFFNLLNELSNIRLYSVDKREKSVLWRLSSKDKINIILNILQIILFKNDGKISNLDINKIVKNESIKSIILNEIDLDLIKDMWFEKEPNVYGIGLSGLNIEENKKENRFKFQDLKIFSVFIDLLKKSNINIEFNNEKDIIHNLKLLDELYFFLITQKYSRDKYGSIKKFILNNKSFNIDNLDEKLNIFLSISDDEFDNHNSKTHSLSKEAIYFIFPKLLHNNEGWNLEAIKNYDIDVREEISKHSFGIKKQDKKYLDDAFLDDAILPPSVKVTIKQSILIFNKIIKKFSNKFQIDNVVIELAREMTQEKEMDAQKSLNRLKKSRKKIIEERLNANNIDSKMFRDKTGEISPNYIYKIYLWISQNFKDPYTGENISANDILKNNVEIDHIIPYSLCFDDSSSNKVLVFKHSNQSKGNFLPFDMISTFSENSVWNWKEYTQYVEKTFKTNLESILDKKERVKKADNLLTSSYDGYDKLGFLARNLNDTRYATILFRDQLINYSENHLIDSKKMFKVIAMNGGVTSFIRKNMSFDSGLKVKDRSIFSHHAYDAAIIALFSNKTKILYNLINPSLDGIISKRSEGYWVLEDRLTGEIRKLNYNDWQSIKNNVEVKKIAREIESHLSNLDNVVMFSRKSKRKTNKELYNETLYGIATRIDENGIKNYYKKEKFNILEDENIYLRLLNERENFIINRSNPEVIDAIIEIFETIDKNKIPARDVAKNIKYTDNKIKYNLYLKDYMRKLVDEFPDKFRKDFIEQMIAKKIFILFNPIKNTTRKIKSLRSINNNKIEDIRKKQVLEKFNTAKNEPRSFYESLNSLGAIIFKNNLNIYKKMSISSQIATFGDKNWKIDDINTYNKEKLNKYKEIYGIDETYDFYSFIFPGTILLDEKNKEFLYISSIQTLKDKIELKFLDRIEFEKKNVNSNLKPKIKREIISTKKLMSDYKIIKISPLGINKKIFE

SEQ ID NO: 548 - protein, 1269 aa, Mycoplasma gallisepticum
MNNSIKSKPEVTIGLDLGVGSVGWAIVDNETNIIHHLGSRLFSQAKTAEDRRSFRGARRLIRRRKYKLKRFINLIWKYNSYFGFKNKEDILNNYQEQQKLHNTVLNLKLEALNAKIDPKALSWILHDYLKNRGHFYEDNRDFNVYPTEELANYFGEYGYYKGIIDSKEDNDDKLEEGLTKYKFSNQHWLEEIKKVLSNQTGLPEKFKEEYESLFSYVRNYSEGPGSINSVSPYGIYHLDEKEGKVVQKYNNIWDKTIGKCSIFPDEYRAPKNSPIAMIFNEINELSTIRSYSIYLTGWFINQEFKKAYLNKLLDLLIKTNSEKPIDARQFKKLREETIAESIGKETLKDVEREEKLEKEDHKWKLKGLKLNTNGKIQYNDLSSLAKFVHKLKQHLKLDFLLEDQYTTLDKINFLQSLFVYLGKHLRYSNRVDSANLKEFSDSNKLFERVLQEQKDDLFKLFEQTDKDDEKILAQTHSLSTKAMLLAITRMTNLDNDEDNQKNNDKGWNFEAIKNFDQKFIDITKKNNNLSLKQDKRYLDDRFINDAILSPGVKRILREATKVFNAILKQFSEEYDVTKVVIELARELSEEKELENTKNYEKLIKKNSDKISERLEALDIAEDKIEDILKSPTKSYKVLLWLQQDHIDPYSQKEIAFEDILTKTEKTEIDHIIPYSISFDDSSSNKLLVLAESNQAKSNQTPYEFITSGNAGIKWEDYEAYCRKFKDGDTSLLDSTQRSKKFAKMMKTDTSSKYDIGFLARNLNDTRYATIVFRDALKDYANNHLVEDKPMFKVVCINGGVTSFLRKNFDKSWYAKKDRDKNIHHAVDASIISIFSNETKTLFNQLTQFADYKLFKNTDGSWKKIDPKTGVVTEVTDENWKQIRVRNQVSEIAKVINKCIQDSNIERKARYSRKIENKTNISLFNDTVYSAKKVGYEDQIKRKNLKTLDIHESAEENKNSKVKKQFVYRKLVNVSLLNNDKLADLFAEKEDILMYRANPWVINLAEQIFNEYTENKKIKSQNVFEKYMLDLTKEFPEKFSEAFVKSMLRNKTAIIYNVEKKVVHRIKRLKILSSELKENKLSNVIIRSKNESGTKLSYQDTINSIALMIMRSIDPTAKKQYIRVPLNTLNLHLGDQDFDLHNIDAYLKKPKFVKYLKANEIGDEYKPWRVLTSGTLLIHKKDKKLMYISSFQNLKDVIEIKNLIETEYKENDDSDPKKKKKANRFLMTLSTILNDYILLDAKDNFDILGLSKNRIDEILNSKLGLDKITK

SEQ ID NO: 549 - protein, 1224 aa, Mycoplasma gallisepticum
MNNSIKSKPEVTIGLDLGVGSVGWAIVDNETNIIHHLGSRLFSQAKTAEDRRSFRGARRLIRRRKYKLKRFINLIWKYNSYFGFKNKEDILNNYQEQQKLHNTVLNLKLEALNAKIDPKALSWILHDYLKNRGHFYEDNRDFNVYPTEELANYFGEYGYYKGIIDSKEDNDDKLEEGLTKYKFSNQHWLEEIKKVLSNQTGLPEKFKEEYESLFSYVRNYSEGPGSINSVSPYGIYHLDEKEGKVVQKYNNIWDKTIGKCSIFPDEYRAPKNSPIAMIFNEINELSTIRSYSIYLTGWFINQEFKKAYLNKLLDLLIKTNSEKPIDARQFKKLREETIAESIGKETLKDVEREEKLEKEDHKWKLKGLKLNTNGKIQYNDLSSLAKFVHKLKQHLKLDFLLEDQYTTLDKINFLQSLFVYLGKHLRYSNRVDSANLKEFSDSNKLFERVLQEQKDDLFKLFEQTDKDDEKILAQTHSLSTKAMLLAITRMTNLDNDEDNQKNNDKGWNFEAIKNFDQKFIDITKKNNNLSLKQDKRYLDDRFINDAILSPGVKRILREATKVFNAILKQFSEEYDVTKVVIELARELSEEKELENTKNYEKLIKKNSDKISERLEALDIAEDKIEDILKSPTKSYKVLLWLQQDHIDPYSQKEIAFEDILTKTEKTEIDHIIPYSISFDDSSSNKLLVLAESNQAKSNQTPYEFITSGNAGIKWEDYEAYCRKFKDGDTSLLDSTQRSKKFAKMMKTDTSSKYDIGFLARNLNDTRYATIVFRDALKDYANNHLVEDKPMFKVVCINGGVTSFLRKNFDKSWYAKKDRDKNIHHAVDASIISIFSNETKTLFNQLTQFADYKLFKNTDGSWKKIDPKTGVVTEVTDENWKQIRVRNQVSEIAKVINKCIQDSNIERKARYSRKIENKTNISLFNDTVYSAKKVGYEDQIKRKNLKTLDIHESAEENKNSKVKKQFVYRKLVNVSLLNNDKLADLFAEKEDILMYRANPWVINLAEQIFNEYTENKKIKSQNVFEKYMLDLTKEFPEKFSEAFVKSMLRNKTAIIYNVEKKVVHRIKRLKILSSELKENKLSNVIIRSKNESGTKLSYQDTINSIALMIMRSIDPTAKKQYIRVPLNTLNLHLGDQDFDLHNIDAYLKKPKFVKYLKANEIGDEYKPWRVLTSGTLLIHKKDKKLMYISSFQNLKDVIEIKNLIETEYKENDDSDPKKRRKQIGS

SEQ ID NO: 550 - protein, 1269 aa, Mycoplasma gallisepticum; identical to SEQ ID NO: 138

SEQ ID NO: 551 - protein, 226 aa, Mycoplasma iowae
MSNKKKITIGLDIGVSSVGWSILREDNVLIDYGSRLFPDAANAKDGKLENEARRSHRSMRRRIRRIKTRKNDLIKLLIKYNIISDQDELAKILEQGIVNETGNVPIVEIKYKGLKEKLSKEELLICLYHYIHKRGYFYITEEDLKENGENINRLPTEIQYDFYMKNGYYIGNEDNQKFSNLIWVKEIEKFLSKQSLDSNFVDEYISLFRRVRDYSDGPGSEKSPTP

SEQ ID NO: 552 - protein, 1304 aa, Mycoplasma synoviae
MLNNVQNLWKYLLLLIFDKKIIFLFKIKVILIRRYMENNNKEKIVIGFDLGVASVGWSIVNAETKEVIDLGVRLFSEPEKADYRRAKRTTRRLLRRKKFKREKFHKLILKNAEIFGLQSRNEILNVYKDQSSKYRNILKLKINALKEEIKPSELVWILRDYLQNRGYFYKNEKLTDEFVSNSFPSKKLHEHYEKYGFFRGSVKLDNKLDNKKDKAKEKDEEEESDAKKESEELIFSNKQWINEIVKVFENQSYLTESFKEEYLKLFNYVRPFNKGPGSKNSRTAYGVFSTDIDPETNKFKDYSNIWDKTIGKCSLFEEEIRAPKNLPSALIFNLQNEICTIKNEFTEFKNWWLNAEQKSEILKFVFTELFNWKDKKYSDKKFNKNLQDKIKKYLLNFALENFNLNEEILKNRDLENDTVLGLKGVKYYEKSNATADAALEFSSLKPLYVFIKFLKEKKLDLNYLLGLENTEILYFLDSIYLAISYSSDLKERNEWFKKLLKELYPKIKNNNLEIIENVEDIFEITDQEKFESFSKTHSLSREAFNHIIPLLLSNNEGKNYESLKHSNEELKKRTEKAELKAQQNQKYLKDNFLKEALVPLSVKTSVLQAIKIFNQIIKNFGKKYEISQVVIEMARELTKPNLEKLLNNATNSNIKILKEKLDQTEKFDDFTKKKFIDKIENSVVFRNKLFLWFEQDRKDPYTQLDIKINEIEDETEIDHVIPYSKSADDSWFNKLLVKKSTNQLKKNKTVWEYYQNESDPEAKWNKFVAWAKRIYLVQKSDKESKDNSEKNSIFKNKKPNLKFKNITKKLFDPYKDLGFLARNLNDTRYATKVFRDQLNNYSKHHSKDDENKLFKVVCMNGSITSFLRKSMWRKNEEQVYRFNFWKKDRDQFFHHAVDASIIAIFSLLTKTLYNKLRVYESYDVQRREDGVYLINKETGEVKKADKDYWKDQHNFLKIRENAIEIKNVLNNVDFQNQVRYSRKANTKLNTQLFNETLYGVKEFENNFYKLEKVNLFSRKDLRKFILEDLNEESEKNKKNENGSRKRILTEKYIVDEILQILENEEFKDSKSDINALNKYMDSLPSKFSEFFSQDFINKCKKENSLILTFDAIKHNDPKKVIKIKNLKFFREDATLKNKQAVHKDSKNQIKSFYESYKCVGFIWLKNKNDLEESIFVPINSRVIHFGDKDKDIFDFDSYNKEKLLNEINLKRPENKKFNSINEIEFVKFVKPGALLLNFENQQIYYISTLESSSLRAKIKLLNKMDKGKAVSMKKITNPDEYKIIEHVNPLGINLNWTKKLENNN

SEQ ID NO: 553 - protein, 1401 aa, Myroides injenensis
MKRILGLDLGTTSIGWAYVHEAENVNETSSIQKVGVRVNPLTTEEQTNFEKGKPITTNASRTLARSARRNLQRYKLRRDNLIQILKENNWINNTTSLTETGNHSTFETYELRNKAASEKLTLDQLSRVLLMLNKKRGYKSSRKVNSKEEGQLIDGMEVAKKLYHEQLTPGQLSLQLMNQGVKKLPDYYRSDLNQELESIWNFQQQFYPNILTDKFKEEINGKGLTSTSSAFWNIYNFNTAENKGSRDEKKKQALQWRSEALSKQLSKEIVAYIIADLNGQIYNSSGYLGAISDRSKELYFNNLTVGQYLFKQLKSNPHTSLKNQVFYRQDYLNEFEKIWETQSKFYPKELTAALKREIRDVIIFYQRKLKSQKGLISFCEFEQKQKTINGKTKTIGHRVIPKSSPLFQEFKIWQQLHNVVLRNKKTNEIVSLADEQKVHLFEELNLKGKLKSNQVLKLIENKPKDWELNYTELEGNNTNKALYNAYLDILDIEGYDVRNELKVKLNKDDIELSDLDVNASEIKEMIFSVFKHLGINTEILEFDATLEDKVFEKQASYQLWHLLYSYEEDNSPTGLDRLYNLLHKKFGFKLNHAKLIGNVLFQDDYGSLSSKAIKNIFPYITENNYYTACELAGYKHSKHSLTKEENETRELKNRLTILPKNSLRNPVVEKIINQMINVVNTLIDEENNILIAQGKEPNFQFDEIRIELARELKKNAKEREELTKSINKSKTDHEKIIKILQKEDGIKNPTRNDIVRFKLYSELKNNGYKDLYTNEYIERKDIFTKEYDIEHIIPQSKLFDDSFSNKTLVRRNVNLKKGNQTAYDFILCEYGQEKANEFETRITNLYNLGKDEGISKSKFKKLLMQESEIGNGFIERDLRETQYIAKKAKSLLLEITRNVISTSGSITDRLREDWGLINVMKELNLQKYRDAGLTEFVKMKDGNKKEVIIDWTKRNDHRHHAMDALTIAFTKHNHIQYLNHLNARKNVNNELHNNIIAIEKLETTLVSDERGNKKRIFKEPIANFRTIAKSHLEAILVSHKAKNKVVTKNINKISGKKISQQTLTPRGQLHKETIYGKIRQYVSKQEKVGPKFTIEVIEQVSNPTYRNLLLKRLEENNNDPKKAFGGKNSLNKNPIYINLEKNIKVPEVLKLVWLEDNYTIRKEISPDLKIDKVIDQGVKQILQNRLAQYKGDSKLAFSNLDANPIWLNEDKGIAIKRVTISGIATAQPLHRKKDHLGQPILDHNGQEIPVDFISTGNNHHVAIYEDENGKLQESVVSHFEAVERVNQKLPIIDKTFNQHLGWKFLFTMKQNELFLFPSDDFNPNEIDLFDKQNYTVISKHLFRIQKLSTKDYSFRHHLETNVEEIKDLKTITWRREGLNGIQNIIKVRTNHLGEIIHIGEY

SEQ ID NO: 554 - protein, 1466 aa, Myroides odoratus
MKNILGLDLGTNSIGWALVKEDFENKQGEILGLGSRIIPMSQDILGEFGRGNSISQTADRTGYRGVRRLRERHLLRRERLHRVLNILGFLPNHYAKEIDFTKRLGKFINHAEPKLSFDKEFIFKDSFNEMLKDFQQNQPGFIINKHGEEALVPYDWTIYYLRKKALTQKIDKEELAWILLNFNQKRGYYQLRGEEEEENTNKLVEFYSLKIIDVIADNEVNKKGEVWYSLHLENGWIYRRSSKISLVDWKDKVRDFIVTTDVNDDGSEKLDKDGVVKRSFRAPSADDWTLLKKKTEQDIDNSNKTVGAYIYENLLLNPKQKIKGKLVRTIERKFYKDELKQILEKQKEFHQELQNEQLLQDCVRELYKYNEQHQQMLESKDFVHLFLNDIIFYQRPLRSQKSLISNCTLEKRVSRDGVVFPIKVISKSNPYYQEFRLLQWLQNLAIYRKDDDVNVTQEFLNSIESWENLLQFLNAKKEIKQEQLIKFLLEQKGLKGNSLKTAILTYRWNYVTDKVYPMNETRSLIQDKLKKVENVATDFLSFDNEMALWHIIYSVNDKIEYEKALAKFASKHNLDEISFVESFKKFPPFKSDYGSFSEKAIKKLLPLMRFGSVWNKNNIVPSVLDRIDKILTGEYDEKIKIRVREKAEQFQLNQIEDFQNLPLWLAQYVVYDRHSEAEIAGKWNSVKDLENYLKEFKQHSLRNPIVEQIITETLRVVKDIWQQYGNGVQNFFDEIHIELGREMKNTADERKRITNSVTENENTNLRIKALLVELKEDTNIENVRPHSPMQQEILKIYEEGVLNAVENIDEDILKISKTAQPSKSELIRYKLWLEQKYQSPYTGEMIPLSRLFTSDYEIEHVIPQSRYFDDSLSNKVICEAAVNKRKDNQLGLEFIKNHHSEKIELGNGRTAQVLEVEAYESFVKKNYDKNRGKRNKLLLEDVPEKMIERQLNDTRYISKFVTHLLSNIVRKDEVNSKDDGINSKNIIPGNGKITSQLKQDWGLNDVWNELILPRFERMNNLTNSTDFTSTNTNGKIIPTVPLEYSKGFSKKRIDHRHHALDALVIALATRDHVNLLNNESALPKKDRTKEEQKSFRFDLQVNLRNKEKYFNVKEGREKEKFTTFKKPWNTLTQDTRDALENMVVSFKQNLRVINKATNYYESYTDENGNLRLDKYGNPKKELISQKGTNWAIRKSLHKETVSGQIHLDRVKVTKGKIVTATRKSLDSSFNEKSIESITDTGIQKILRNYLKAKDNKPDVAFSPEGIEELNKSISVYNEGKNHQPIIKVRIFEQGSKFPVGETGNKIAKFVEAAKGTNLFFGIYQDKTGKRSYDTIPLNLVIERLKQGLSPVPETNEKGHQLLFHLSPNDLVYVPTIDDNEQLDSNRVYKFTDSSDTTCNFIPSNISAIIFNINSKEQEKRGINYPIQNELGVGSPQSKNQKSFDGFMIKEVCIKLKVDRLGNISKT

SEQ ID NO: 555 - protein, 241 aa, Neisseria lactamica
MAAFKPNPMNYILGLDIGIASVGWAMVEIDKEENPIRLIDLGVRVFERAEMPKTGDSLAMARRLARSVRRLTRRRAHRLLRARRLLKREGVLQDADFDENGLVKSLPNTPWQLRAAALDRKLTCLEWSAVLLHLIKHRGYLSQRKNEGETADKELGALLKGVADNAHALQTGDFRTPAELALNKFEKESGHIRNQRGDYSHTFSRKDLQAELNLLFEKQKEFGNPHVSDGLKEGIETLLMA

SEQ ID NO: 556 - protein, 666 aa, Neisseria lactamica
MAAFKPNPMNYILGLDIGIASVGWAMVEVDEEENPIRLIDLGVRVFERAEVPKTGDSLAMARRLARSVRRLTRRRAHRLLRARRLLKREGVLQDADFDENGLVKSLPNTPWQLRAAALDRKLTCLEWSAVLLHLVKHRGYLSQRKNEGETADKELGALLKGVADNAHALQTGDFRTPAELALNKFEKESGHIRNQRGDYSHTFSRKDLQAELNLLFEKQKEFGNPHVSDGLKEDIETLLMAQRPALSGDAVQKMLGHCTFEPAEPKAAKNTYTAERFIWLTKLNNLRILEQGSERPLTDTERATLMDEPYRKSKLTYAQARKLLGLEDTAFFKGLRYGKDNAEASTLMEMKAYHAISRALEKEGLKDKKSPLNLSTELQDEIGTAFSLFKTDKDITGRLKDRVQPEILEALLKHISFDKFVQISLKALRRIVPLMEQGKRYDEACAEIYGDHYCKKNAEEKIYLPPIPADEIRNPVVLRALSQARKVINCVVRRYGSPARIHIETAREVGKSFKDRKEIEKRQEENRKDREKAAAKFREYFPNFVGEPKSKDILKLRLYEQQHGKCLYSGKEINLVRLNEKGYVEIDHALPFSRTWDDSFNNKVLVLGSENQNKGNQTPYEYFNGKDNSREWQEFKARVETSRFPRSKNNGFCCKNSMKKDLKNAT

SEQ ID NO: 557 - protein, 828 aa, Neisseria lactamica
MLGHCTFEPAEPKAAKNTYTAERFIWLTKLNNLRILEQGSERPLTDTERATLMDEPYRKSKLTYAQARKLLGLEDTAFFKGLRYGKDNAEASTLMEMKAYHAISRALEKEGLKDKKSPLNLSTELQDEIGTAFSLFKTDKDITGRLKDRVQPEILEALLKHISFDKFVQISLKALRRIVPLMEQGKRYDEACAEIYGDHYGKKNTEEKIYLPPIPADEIRNPVVLRALSQARKVINAVVRRYDSPARIHIETAREVGKSFKDRKEIEKRQEENRKDREKAAAKFREYFPNFVGEPKSKDILKLRLYEQQHGKCLYSGKEINLVRLNEKGYVEIDHALPFSRTWDDSFNNKVLVLGSENQNKGNQTPYEYFNGKDNSREWQEFKARVETSRFPRSKKQRILLQKFDEEGFKERNLNDTRYVNRFLCQFVADHILLTGKGKRRVFASNGQITNLLRGFWGLRKVRAENDRHHALDAVVVACSTVAMQQKITRFVRYKEMNAFDGKTIDKETGEVLHQKAHFPQPWEFFAQEVMIRVFGKPDGKPEFEEADTSEKLRTLLAEKLSSRPEAVHEYVTPLFVSRAPNRKMSGQGHMETVKSAKRLDEGISVLRVPLTQLKLKDLEKMVNREREPKLYDALKAQLETHKDDPAKAFAEPFYKYDKAGSRTQQVKAVRIEQVQKTGVWVRNHNGIADNATMVRVDVFEKGGKYYLVPIYSWQVAKGILPDRAVVAFKDEEDWTVMDDSFEFRFVLYANDLIKAELKKETFFGYFSGLDRSTGNISLRSHDLDKTKGKDGVYRIGIKTALSFQKHQIDELGKEIRPCRLKKRPPVR

SEQ ID NO: 558 - protein, 408 aa, Neisseria lactamica
MNDTRYVNRFLCQFVADHILLTGKGKRRVFASNGQITNLLRGFWGLRKVRTENDRHHALDAVVVACSTVAMQQKITRFVRYKEMNAFDGKTIDKETGEVLHQKAHFPQPWEFFAQEVMIRVFGKPDGKPEFEEADTPEKLRTLLAEKLSSRPEAVHEYVTPLFVSRAPNRKMSGQGHMETVKSAKRLDEGISVLRVPLTQLKLKGLEKMVNREREPKLYDALKAQLETHKDDPAKAFAEPFYKYDKAGSRTQQVKAVRIEQVQKTGVWVRNHNGIADNATMVRVDVFEKGGKYYLVPIYSWQVAKGILPDRAVVAFKDEEDWTVMDDSFEFRFVLYANDLIKLTAKKNEFLGYFVSLNRATGAIDIRTHDTDSTKGKNGIFQSVGVKTALSFQKTKSTNSAKKSDHAV

SEQ ID NO: 559 - protein, 1082 aa, Neisseria meningitidis
MAAFKPNPINYILGLDIGIASVGWAMVEIDEDENPICLIDLGVRVFERAEVPKTGDSLAAARRLARSVRRLTRRRAHRLLRARRLLKREGVLQAADFDENGLIKSLPNTPWQLRAAALDRKLTPLEWSAVLLHLIKHRGYLSQRKNEGETADKELGALLKGVADNAHALQTGDFRTPAELALNKFEKESGHIRNQRGDYSHTFSRKDLQAELILLFEKQKEFGNPHVSGGLKEGIETLLMTQRPALSGDAVQKMLGHCTFEPAEPKAAKNTYTAERFIWLTKLNNLRILEQGSERPLTDTERATLMDEPYRKSKLTYAQARKLLGLEDTAFFKGLRYGKDNAEASTLMEMKAYHAISRALEKEGLKDKKSPLNLSPELQDEIGTAFSLFKTDEDITGRLKDRVQPEILEALLKHISFDKFVQISLKALRRIVPLMEQGKRYDEACAEIYGDHYGKKNTEEKIYLPPIPADEIRNPVVLRALSQARKVINGVVRRYGSPARIHIETAREVGKSFKDRKEIEKRQEENRKDREKAAAKFREYFPNFVGEPKSKDILKLRLYEQQHGKCLYSGKEINLGRLNEKGYVEIDHALPFSRTWDDSFNNKVLVLGSENQNKGNQTPYEYFNGKDNSREWQEFKARVETSRFPRSKKQRILLQKFDEDGFKERNLNDTRYVNRFLCQFVADRMRLTGKGKKRVFASNGQITNLLRGFWGLRKVRAENDRHHALDAVVVACSTVAMQQKITRFVRYKEMNAFDGKTIDKETGEVLHQKTHFPQPWEFFAQEVMIRVFGKPDGKPEFEEADTPEKLRTLLAEKLSSRPEAVHEYVTPLFVSRAPNRKMSGQGHMETVKSAKRLDEGVSVLRVPLTQLKLKDLEKMVNREREPKLYEALKARLEAHKDDPAKAFAEPFYKYDKAGNRTQQVKAVRVEQVQKTGVWVRNHNGIADNATMVRVDVFEKGDKYYLVPIYSWQVAKGILPDRAVVQGKDEEDWQLIDDSFNFKFSLHPNDLVEVITKKARMFGYFASCHRGTGNINIRIHDLDHKIGKNGILEGIGVKTALSFQKYQIDELGKEIRPCRLKKRPPVR

SEQ ID NO: 560 - protein, 976 aa, Neisseria meningitidis
MAAFKPNPINYILGLDIGIASVGWAMVEIDEDENPICLIDLGVRVFERAEVPKTGDSLAAARRLARSVRRLTRRRAHRLLRARRLLKREGVLQAADFDENGLIKSLPNTPWQLRAAALDRKLTPLEWSAVLLHLIKHRGYLSQRKNEGETADKELGALLKGVADNAHALQTGDFRTPAELALNKFEKESGHIRNQRGDYSHTFSRKDLQAELILLFEKQKEFGNPHVSGGLKEGIETLLMTQRPALSGDAVQKMLGHCTFEPAEPKAAKNTYTAERFIWLTKLNNLRILEQGSERPLTDTERATLMDEPYRKSKLTYAQARKLLGLEDTAFFKGLRYGKDNAEASTLMEMKAYHAISRALEKEGLKDKKSPLNLSPELQDEIGTAFSLFKTDEDITGRLKDRIQPEILEALLKHISFDKFVQISLKALRRIVPLMEQGKRYDEACAEIYGDHYGKKNTEEKIYLPPIPADEIRNPVVLRALSQARKVINGVVRRYGSPARIHIETAREVGKSFKDRKEIEKRQEENRKDREKAAAKFREYFPNFVGEPKSKDILKLRLYEQQHGKCLYSGKEINLGRLNEKGYVEIDHALPFSRTWDDSFNNKVLVLGSENQNKGNQTPYEYFNGKDNSREWQEFKARVETSRFPRSKKQRILLQKFDEDGFKERNLNDTRYVNRFLCQFVADRMRLTGKGKKRVFASNGQITNLLRGFWGLRKVRAENDRHHALDAVVVACSTVAMQQKITRFVRYKEMNAFDGKTIDKETGEVLHQKTHFPQPWEFFAQEVMIRVFGKPDGKPEFEEADTPEKLRTLLAEKLSSRPEAVHEYVTPLFVSRAPNRKMSGQGHMETVKSAKRLDEGVSVLRVPLTQLKLKDLEKMVNREREPKLYEALKARLEAHKDDPAKAFAEPFYKYDKAGNRTQQVKAVRVEQVQKTGVWVRNHNGIADNATMVRVDVFEKGDKYYLVPIYSWQVAKGIFAG

SEQ ID NO: 561 - protein, 1081 aa, Neisseria meningitidis
MAAFKPNPINYILGLDIGIASVGWAMVEIDEDENPICLIDLGVRVFERAEVPKTGDSLAAARRLARSVRRLTRRRAHRLLRARRLLKREGVLQAADFDENGLIKSLPNTPWQLRSAALDRKLTPLEWSAVLLHLIKHRGYLSQRKNEGETADKELGALLKGVADNAHALQTGDFRTPAELALNKFEKESGHIRNRRGDYSHTFSRKDLQAELDLLFEKQKEFGNPHISDDLKEGIETLLMTQRPALSGDAVQKMLGHCTFEPTEPKAAKNTYTAERFVWLTKLNNLRILEQGSERPLTDTERATLMDEPYRKSKLTYAQARKLLELDDTAFFKGLRYGKDNAEASTLMEMKAYHAISRALEKEGLKDKKSPLNLSPELQDEIGTAFSLFKTDEDITGRLKDRVQPEILEVLLKHISFDKFVQISLKALRRIVPLMEQGKRYDEACAEIYGDHDGKKNTEEKIYLPPIPADEIRNPVVLRALSQARKVINAVVRRYGSPARIHIETAREVGKSFKDRKEIEKRQEENRKDREKAAAKFREYFPNFVGEPKSKDILKLRLYEQQHGKCLYSGKEINLGRLNEKGYVEIDHALPFSRTWDDSFNNKVLVLGSENQNKGNQTPYEYFNGKDNSREWQEFKARVETSRFPRSKKQRILLQKFDEEGFKERNLNDTRYVNRFLCQFVADHMLLTGKGKRRVFASNGQITNLLRGFWGLRKVRAENNRHHALDAVVVACSTVAMQQKITRFVRYKEMNAFDGKTIDKETGEVLHQKTHFPQPWEFFAQEVMIRVFGKPDGKPEFEEADTPEKLRTLLAEKLSSRPEAVHEYVTPLFVSRAPNRKMSGQGHMETVKSAKRLDEGVSVLRVPLTQLKLKDLEKMVNREREPKLYEALKARLEAHKDDPAKAFAEPFYKYDKAGNRTQQVKAVRVEQVQKTGVWVRNHNGIADNATMVRVDVFEKAGKYYLVPIYSWQVAKGILPDRAVVAYADEEGWTVIDESFRFKFVLYSNDLIKVQLKKDSFLGYFSGLDRATGAISLREHDLEKSKGKDGMHRIGVKTALSFQKYQIDEMGKEIRLCRLKKRPPVR

SEQ ID NO: 562 - protein, 1081 aa, Neisseria meningitidis
MAAFKPNPINYILGLDIGIASVGWAMVEIDEDENPICLIDLGVRVFERAEVPKTGDSLAAARRLARSVRRLTRRRAHRLLRARRLLKREGVLQAADFDENGLIKSLPNTPWQLRSAALDRKLTPLEWSAVLLHLIKHRGYLSQRKNEGETADKELGALLKGVANNAHALQTGDFRTPAELALNKFEKESGHIRNQRGDYSHTFSRKDLQAELILLFEKQKEFGNPHVSGGLKEGIETLLMTQRPALSGDAVQKMLGHCTFEPAEPKAAKNTYTAERFIWLTKLNNLRILEQGSERPLTDTERATLMDEPYRKSKLTYAQARKLLGLEDTAFFKGLRYGKDNAEASTLMEMKAYHAISRALEKEGLKDKKSPLNLSPELQDEIGTAFSLFKTDEDITGRLKDRIQPEILEALLKHISFDKFVQISLKALRRIVPLMEQGKRYDEACAEIYGDHYGKKNTEEKIYLPPIPADEIRNPVVLRALSQARKVINGVVRRYGSPARIHIETAREVGKSFKDRKEIEKRQEENRKDREKAAAKFREYFPNFVGEPKSKDILKLRLYEQQHGKCLYSGKEINLGRLNEKGYVEIDHALPFSRTWDDSFNNKVLVLGSENQNKGNQTPYEYFNGKDNSREWQEFKARVETSRFPRSKKQRILLQKFDEDGFKERNLNDTRYVNRFLCQFVADRMRLTGKGKKRVFASNGQITNLLRGFWGLRKVRAENDRHHALDAVVVACSTVAMQQKITRFVRYKEMNAFDGKTIDKETGEVLHQKTHFPQPWEFFAQEVMIRVFGKPDGKPEFEEADTPEKLRTLLAEKLSSRPEAVHEYVTPLFVSRAPNRKMSGQGHMETVKSAKRLDEGVSVLRVPLTQLKLKDLEKMVNREREPKLYEALKARLEAHKDDPAKAFAEPFYKYDKAGNRTQQVKAVRVEQVQKTGVWVRNHNGIADNATMVRVDVFEKAGKYYLVPIYSWQVAKGILPDRAVVAYADEEGWTVIDESFRFKFVLYSNDLIKVQLKKDSFLGYFSGLDRATGAISLREHDLEKSKGKDGMHRIGVKTALSFQKYQIDEMGKEIRLCRLKKRPPVR

SEQ ID NO: 563 - protein, 1082 aa, Neisseria meningitidis
MAAFKPNPINYILGLDIGIASVGWAMVEIDEDENPICLIDLGVRVFERAEVPKTGDSLAMARRLARSVRRLTRRRAHRLLRARRLLKREGVLQAADFDENGLIKSLPNTPWQLRAAALDRKLTPLEWSAVLLHLIKHRGYLSQRKNEGETADKELGALLKGVADNAHALQTGDFRTPAELALNKFEKESGHIRNQRGDYSHTFSRKDLQAELILLFEKQKEFGNPHVSGGLKEGIETLLMTQRPALSGDAVQKMLGHCTFEPAEPKAAKNTYTAERFIWLTKLNNLRILEQGSERPLTDTERATLMDEPYRKSKLTYAQARKLLGLEDTAFFKGLRYGKDNAEASTLMEMKAYHAISRALEKEGLKDKKSPLNLSPELQDEIGTAFSLFKTDEDITGRLKDRIQPEILEALLKHISFDKFVQISLKALRRIVPLMEQGKRYDEACAEIYGDHYGKKNTEEKIYLPPIPADEIRNPVVLRALSQARKVINGVVRRYGSPARIHIETAREVGKSFKDRKEIEKRQEENRKDREKAAAKFREYFPNFVGEPKSKDILKLRLYEQQHGKCLYSGKEINLGRLNEKGYVEIDHALPFSRTWDDSFNNKVLVLGSENQNKGNQTPYEYFNGKDNSREWQEFKARVETSRFPRSKKQRILLQKFDEDGFKERNLNDTRYVNRFLCQFVADRMRLTGKGKKRVFASNGQITNLLRGFWGLRKVRAENDRHHALDAVVVACSTVAMQQKITRFVRYKEMNAFDGKTIDKETGEVLHQKTHFPQPWEFFAQEVMIRVFGKPDGKPEFEEADTPEKLRTLLAEKLSSRPEAVHEYVTPLFVSRAPNRKMSGQGHMETVKSAKRLDEGVSVLRVPLTQLKLKDLEKMVNREREPKLYEALKARLEAHKDDPAKAFAEPFYKYDKAGNRTQQVKAVRVEQVQKTGVWVRNHNGIADNATMVRVDVFEKGDKYYLVPIYSWQVAKGILPDRAVVQGKDEEDWQLIDDSFNFKFSLHPNDLVEVITKKARMFGYFASCHRGTGNINIRIHDLDHKIGKNGILEGIGVKTALSFQKYQIDELGEEIRPCRLKKRPPVR

SEQ ID NO: 564 - protein, 1082 aa, Neisseria meningitidis
MAAFKPNPINYILGLDIGIASVGWAMVEIDEDENPICLIDLGVRVFERAEVPKTGDSLAMARRLARSVRRLTRRRAHRLLRARRLLKREGVLQAADFDENGLIKSLPNTPWQLRAAALDRKLTPLEWSAVLLHLIKHRGYLSQRKNEGETADKELGALLKGVADNAHALQTGDFRTPAELALNKFEKESGHIRNQRGDYSHTFSRKDLQAELILLFEKQKEFGNPHVSGGLKEGIETLLMTQRPALSSDAVQKMLGHCTFEPAEPKAAKNTYTAERFIWLTKLNNLRILEQGSERPLTDTERATLMDEPYRKSKLTYAQARKLLGLEDTAFFKGLRYGKDNAEASTLMEMKAYHAISRALEKEGLKDKKSPLNLSPELQDEIGTAFSLFKTDEDITGRLKDRIQPEILEALLKHISFDKFVQISLKALRRIVPLMEQGKRYDEACAEIYGDHYGKKNTEEKIYLPPIPADEIRNPVVLRALSQARKVINGVVRRYGSPARIHIETAREVGKSFKDRKEIEKRQEENRKDREKAAAKFREYFPNFVGEPKSKDILKLRLYEQQHGKCLYSGKEINLGRLNEKGYVEIDHALPFSRTWDDSFNNKVLVLGSENQNKGNQTPYEYFNGKDNSREWQEFKARVETSRFPRSKKQRILLQKFDEDGFKERNLNDTRYVNRFLCQFVADRMRLTGKGKKRVFASNGQITNLLRGFWGLRKVRAENDRHHALDAVVVACSTVAMQQKITRFVRYKEMNAFDGKTIDKETGEVLHQKTHFPQPWEFFAQEVMIRVFGKPDGKPEFEEADTPEKLRTLLAEKLSSRPEAVHEYVTPLFVSRAPNRKMSGQGHMETVKSAKRLDEGVSVLRVPLTQLKLKDLEKMVNREREPKLYEALKARLEAHKDDPAKAFAEPFYKYDKAGNRTQQVKAVRVEQVQKTGVWVRNHNGIADNATMVRVDVFEKGDKYYLVPIYSWQVAKGILPDRAVVQGKDEEDWQLIDDSFNFKFSLHPNDLVEVITKKARMFGYFASCHRGTGNINIRIHDLDHKIGKNGILEGIGVKTALSFQKYQIDELGKEIRPCRLKKRPPVR

SEQ ID NO: 565 - protein, 1082 aa, Neisseria meningitidis
MAAFKPNPINYILGLDIGIASVGWAMVEIDEDENPICLIDLGVRVFERAEVPKTGDSLAMARRLARSVRRLTRRRAHRLLRARRLLKREGVLQAADFDENGLIKSLPNTPWQLRAAALDRKLTPLEWSAVLLHLIKHRGYLSQRKNEGETADKELGALLKGVADNAHALQTGDFRTPAELALNKFEKESGHIRNQRGDYSHTFSRKDLQAELILLFEKQKEFGNPHVSGGLKEGIETLLMTQRPALSSDAVQKMLGHCTFEPAEPKAAKNTYTAERFIWLTKLNNLRILEQGSERPLTDTERATLMDEPYRKSKLTYAQARKLLGLEDTAFFKGLRYGKDNAEASTLMEMKAYHAISRALEKEGLKDKKSPLNLSPELQDEIGTAFSLFKTDEDITGRLKDRIQPEILEALLKHISFDKFVQISLKALRRIVPLMEQGKRYDEACAEIYGDHYGKKNTEEKIYLPPIPADEIRNPVVLRALSQARKVINGVVRRYGSPARIHIETAREVGKSFKDRKEIEKRQEENRKDREKAAAKFREYFPNFVGEPKSKDILKLRLYEQQHGKCLYSGKEINLGRLNEKGYVEIDHALPFSRTWDDSFNNKVLVLGSENQNKGNQTPYEYFNGKDNSREWQEFKARVETSRFPRSKKQRILLQKFDEDGFKERNLNDTRYVNRFLYQFVADRMRLTGKGKKRVFASNGQITNLLRGFWGLRKVRAENDRHHALDAVVVACSTVAMQQKITRFVRYKEMNAFDGKTIDKETGEVLHQKTHFPQPWEFFAQEVMIRVFGKPDGKPEFEEADTPEKLRTLLAEKLSSRPEAVHEYVTPLFVSRAPNRKMSGQGHMETVKSAKRLDEGVSVLRVPLTQLKLKDLEKMVNREREPKLYEALKARLEAHKDDPAKAFAEPFYKYDKAGNRTQQVKAVRVEQVQKTGVWVRNHNGIADNATMVRVDVFEKGDKYYLVPIYSWQVAKGILPDRAVVQGKDEEDWQLIDDSFNFKFSLHPNDLVEVITKKARMFGYFASCHRGTGNINIRIHDLDHKIGKNGILEGIGVKTALSFQKYQIDELGKEIRPCRLKKRPPVR

SEQ ID NO: 566 - protein, 1081 aa, Neisseria meningitidis
MAAFKPNPINYILGLDIGIASVGWAMVEIDEDENPICLIDLGVRVFERAEVPKTGDSLAMARRLARSVRRLTRRRAHRLLRARRLLKREGVLQAADFDENGLIKSLPNTPWQLRAAALDRKLTPLEWSAVLLHLIKHRGYLSQRKNEGETADKELGALLKGVADNAHALQTGDFRTPAKLALNKFEKESGHIRNQRGDYSHTFSRKDLQAELNLLFEKQKEFGNPHISDGLKEGIETLLMTQRPALSGDAVQKMLGHCTFEPTEPKAAKNTYTAERFVWLTKLNNLRILEQGSEQPLTDTQRAKLMDEPYRKSKLTYAQARKLLGLEDTAFFKGLRYGKDNAEASTLMEMKAYHAISRALEKEGLKDKKSPLNLSPELQDEIGTAFSLFKTDEDITGRLKDRVQPEILEALLKHISFDKFVQISLKALRRIVPLMEQGKRYNEACAEIYGDHYGKKNTEEKIYLPPIPADEIRNPVVLRALSQARKVINGVVRRYGSPARIHIETAREVGKSFKDRKEIEKRQEENRKDREKAAAKFQEYFPNFVGEPKSKDILKLRLYEQQHGKCLYSGKEINLGRLNEKGYVEIDHALPFSRTWDDSFNNKVLVLGSENQNKGNQTPYEYFNGKDNSREWQEFKARVETSRFPRSKKQRILLQKFDEDGFKERNLNDTRYVNRFLCQFVADRMRLTGKGKKRVFASNGQITNLLRGFWGLRKVRAENDRHHALDAVVVACSTVAMQQKITRFVRYKEMNAFDGKTIDKETGEVLHQKTHFPQPWEFFAQEVMIRVFGKPDGKPEFEEADTPEKLRTLLAEKLSSRPEAVHEYVTPLFVSRAPNRKMSGQGHMETVKSAKRLDEGVSVLRVPLTQLKLKDLEKMVNREREPKLYEALKARLEAHKDDPAKAFAEPFYKYDKAGNRTQQVKAVRVEQVQKTGVWVRNHNGIADNATMVRVDVFEKGDKYYLVPIYSWQVAKGILPDRAVVAYADEEDWTVIDESFRFKFVLYSNDLIKVQLKKDSFLGYFSGLDRATGAISLREHDLEKSKGKDGMHRIGVKTALSFQKYQIDEMGKEIRPCRLKKRPPVR

SEQ ID NO: 567 - protein, 1081 aa, Neisseria meningitidis
MAAFKPNPINYILGLDIGIASVGWAMVEIDEEENPIRLIDLGVRVFERAEVPKTGDSLAMARRLARSVRRLTRRRAHRLLRARRLLKREGVLQAADFDENGLIKSLPNTPWQLRAAALDRKLTPLEWSAVLLHLIKHRGYLSQRKNEGETADKELGALLKGVADNAHALQTGDFRTPAELALNKFEKECGHIRNQRGDYSHTFSRKDLQAELNLLFEKQKEFGNPHVSGGLKEGIETLLMTQRPALSGDAVQKMLGHCTFEPAEPKAAKNTYTAERFIWLTKLNNLRILEQGSERPLTDTERATLMDEPYRKSKLTYAQARKLLSLEDTAFFKGLRYGKDNAEASTLMEMKAYHTISRALEKEGLKDKKSPLNLSPELQDEIGTAFSLFKTDEDITGRLKDRIQPEILEALLKHISFDKFVQISLKALRRIVPLMEQGKRYDEACAEIYGDHYGKKNTEEKIYLPPIPADEIRNPVVLRALSQARKVINGVVRRYGSPARIHIETAREVGKSFKDRKEIEKRQEENRKDREKAAAKFREYFPNFVGEPKSKDILKLRLYEQQHGKCLYSGKEINLGRLNEKGYVEIDHALPFSRTWDDSFNNKVLVLGSENQNKGNQTPYEYFNGKDNSREWQEFKARVETSRFPRSKKQRILLQKFDEDGFKERNLNDTRYVNRFLCQFVADRMRLTGKGKKRVFASNGQITNLLRGFWGLRKVRAENDRHHALDAVVVACSTVAMQQKITRFVRYKEMNAFDGKTIDKETGEVLHQKTHFPQPWEFFAQEVMIRVFGKPDGKPEFEEADTPEKLRTLLAEKLSSRPEAVHEYVTPLFVSRAPNRKMSGQGHMETVKSAKRLDEGVSVLRVPLTQLKLKDLEKMVNREREPKLYEALKARLEAHKDDPAKAFAEPFYKYDKAGNRTQQVKAVRVEQVQKTGVWVRNHNGIADNATMVRVDVFEKGDKYYLVPIYSWQVAKGILPDRAVVAYADEEDWTVIDESFRFKFVLYSNDLIKVQLKKDSFLGYFSGLDRATGAISLREHDLEKSKGKDGMHRIGVKTALSFQKYQIDEMGKEIRPCRLKKRPPVR

SEQ ID NO: 568 - protein, 1082 aa, Neisseria meningitidis
MAAFKPNPINYILGLDIGIASVGWAMVEIDEEENPIRLIDLGVRVFERAEVPKTGDSLAMARRLARSVRRLTRRRAHRLLRARRLLKREGVLQAADFDENGLIKSLPNTPWQLRAAALDRKLTPLEWSAVLLHLIKHRGYLSQRKNEGETADKELGALLKGVADNAHALQTGDFRTPAELALNKFEKECGHIRNQRGDYSHTFSRKDLQAELNLLFEKQKEFGNPHVSGGLKEGIETLLMTQRPALSGDAVQKMLGHCTFEPAEPKAAKNTYTAERFIWLTKLNNLRILEQGSERPLTDTERATLMDEPYRKSKLTYAQARKLLGLEDTAFFKGLRYGKDNAEASTLMEMKAYHAISRALEKEGLKDKKSPLNLSPELQDEIGTAFSLFKTDEDITGRLKDRIQPEILEALLKHISFDKFVQISLKALRRIVPLMEQGKRYDEACAEIYGDHYGKKNTEEKIYLPPIPADEIRNPVVLRALSQARKVINGVVRRYGSPARIHIETAREVGKSFKDRKEIEKRQEENRKDREKAAAKFREYFPNFVGEPKSKDILKLRLYEQQHGKCLYSGKEINLVRLNEKGYVEIDHALPFSRTWDDSFNNKVLVLGSENQNKGNQTPYEYFNGKDNSREWQEFKARVETSRFPRSKKQRILLQKFDEEGFKERNLNDTRYVNRFLCQFVADHILLTGKGKRRVFASNGQITNLLRGFWGLRKVRAENDRHHALDAVVVACSTVAMQQKITRFVRYKEMNAFDGKTIDKETGEVLHQKTHFPQPWEFFAQEVMIRVFGKPDGKPEFEEADTPEKLRTLLAEKLSSRPEAVHEYVTPLFVSRAPNRKMSGQGHMETVKSAKRLDEGVSVLRVPLTQLKLKDLEKMVNREREPKLYEALKARLEAHKDDPAKAFAEPFYKYDKAGNRTQQVKAVRVEQVQKTGVWVRNHNGIADNATMVRVDVFEKGGKYYLVPIYSWQVAKGILPDRAVVQGKDEEDWQLIDDSFNFKFSLHPNDLVEVITKKARMFGYFASCHRGTGNINIRIHDLDHKIGKNGILEGIGVKTALSFQKYQIDELGKEIRPCRLKKRPPVR

SEQ ID NO: 569 - protein, 1081 aa, Neisseria meningitidis
MAAFKPNPINYILGLDIGIASVGWAMVEIDEEENPIRLIDLGVRVFERAEVPKTGDSLAMARRLARSVRRLTRRRAHRLLRARRLLKREGVLQAADFDENGLIKSLPNTPWQLRAAALDRKLTPLEWSAVLLHLIKHRGYLSQRKNEGETADKELGALLKGVADNAHALQTGDFRTPAELALNKFEKESGHIRNQRGDYSHTFSRKDLQAELILLFEKQKEFGNPHVSGGLKEGIETLLMTQRPALSGDAVQKMLGHCTFEPAEPKAAKNTYTAERFIWLTKLNNLRILEQGSERPLTDTERATLMDEPYRKSKLTYAQARKLLGLEDTAFFKGLRYGKDNAEASTLMEMKAYHAISRALEKEGLKDKKSPLNLSPELQDEIGTAFSLFKTDEDITGRLKDRVQPEILEALLKHISFDKFVQISLKALRRIVPLMEQGKRYDEACAEIYGDHYGKKNTEEEIYLPPITADEIRNPVVLRALSQARKVINAVVRRYGSPARIHIETAREVGKSFKDRKEIEKRQEENRKDREKAAAKFREYFPNFVGEPKSKDILKLRLYEQQHGKCLYSGKEINLVRLNEKGYVEIDHALPFSRTWDDSFNNKVLVLGSENQNKGNQTPYEYFNGKENSREWQEFKARVETSRFPRSKKQRILLQKFDEDGFKERNLNDTRYVNRFLCQFVADRMRLTGKGKKRVFASNGQITNLLRGFWGLHKVRAENDRHHALDAVVVACSTIAMQQKITRFVRYKEMNAFDGKTIDKETGEVLHQKAHFPQPWEFFAQEVMIRVFGKPDGKPEFEEADTPEKLRTLLAEKLSSRPEAVHEYVTPLFVSRAPNRKMSGQGHMETVKSAKRLDEGISVLRVPLTQLKLKDLEKMVNRAREPKLYEALKARLEAHKDDPAKAFAEPFYKYDKAGNRTQQVKAVRVEQVQKTGVWVRNHNGIADNATMVRVDVFEKAGKYYLVPIYSWQVAKGILPDRAVVAYADEEDWTVIDESFRFKFVLYSNDLIKVQLKKDSFLGYFSGLDRATGAISLREHDLEKSKGKDGMHRIGVKTALSFQKYQIDEMGKEIRPCRLKKRPPVR

SEQ ID NO: 570 - protein, 1082 aa, Neisseria meningitidis
MAAFKPNPINYILGLDIGIASVGWAMVEIDEEENPIRLIDLGVRVFERAEVPKTGDSLAMARRLARSVRRLTRRRAHRLLRARRLLKREGVLQAADFDENGLIKSLPNTPWQLRAAALDRKLTPLEWSAVLLHLIKHRGYLSQRKNEGETADKELGALLKGVANNAHALQTGDFRTPAELALNKFEKESGHIRNQRGDYSHTFSRKDLQAELILLFEKQKEFGNPHVSGGLKEGIETLLMTQRPALSGDAVQKMLGHCTFEPAEPKAAKNTYTAERFIWLTKLNNLRILEQGSERPLTDTERATLMDEPYRKSKLTYAQARKLLGLEDTAFFKGLRYGKDNAEASTLMEMKAYHAISRALEKEGLKDKKSPLNLSSELQDEIGTAFSLFKTDEDITGRLKDRVQPEILEALLKHISFDKFVQISLKALRRIVPLMEQGKRYDEACAEIYGDHYGKKNTEEKIYLPPIPADKIRNPVVLRALSQARKVINGVVRRYGSPARIHIETAREVGKSFKDRKEIEKRQEENRKDREKAAAKFREYFPNFVGEPKSKDILKLRLYEQQHGKCLYSGKEINLVRLNEKGYVEIDHALPFSRTWDDSFNNKVLVLGSENQNKGNQTPYEYFNGKDNSREWQEFKARVETSRFPRSKKQRILLQKFDEDGFKECNLNDTRYVNRFLCQFVADHILLTGKGKRRVFASNGQITNLLRGFWGLRKVRAENDRHHALDAVVVACSTVAMQQKITRFVRYKEMNAFDGKTIDKETGKVLHQKTHFPQPWEFFAQEVMIRVFGKPDGKPEFEEADTPEKLRTLLAEKLSSRPEAVHEYVTPLFVSRAPNRKMSGAHKDTLRSAKRFVKHNEKISVKRVWLTEIKLADLENMVNYKNGREIELYEALKARLEAYGGNAKQAFDPKDNPFYKKGGQLVKAVRVEKTQESGVLLNKKNAYTIADNGDMVRVDVFCKVDKKGKNQYFIVPIYAWQVAENILPDIDCKGYRIDDSYTFCFSLHKYDLIAFQKDEKSKVEFAYYINCDSSNGRFYLAWHDKGSKEQQFRISTQNLVLIQKYQVNELGKEIRPCRLKKRPPVR

SEQ ID NO: 571 - protein, 1082 aa, Neisseria meningitidis
MAAFKPNPINYILGLDIGIASVGWAMVEIDEEENPIRLIDLGVRVFERAEVPKTGDSLAMARRLARSVRRLTRRRAHRLLRARRLLKREGVLQAADFDENGLIKSLPNTPWQLRAAALDRKLTPLEWSAVLLHLIKHRGYLSQRKNEGETADKELGALLKGVANNAHALQTGDFRTPAELALNKFEKESGHIRNQRGDYSHTFSRKDLQAELILLFEKQKEFGNPHVSGGLKEGIETLLMTQRPALSGDAVQKMLGHCTFEPAEPKAAKNTYTAERFIWLTKLNNLRILEQGSERPLTDTERATLMDEPYRKSKLTYAQARKLLGLEDTAFFKGLRYGKDNAEASTLMEMKAYHAISRALEKEGLKDKKSPLNLSSELQDEIGTAFSLFKTDEDITGRLKDRVQPEILEALLKHISFDKFVQISLKALRRIVPLMEQGKRYDEACAEIYGDHYGKKNTEEKIYLPPIPADEIRNPVVLRALSQARKVINGVVRRYGSPARIHIETAREVGKSFKDRKEIEKRQEENRKDREKAAAKFREYFPNFVGEPKSKDILKLRLYEQQHGKCLYSGKEINLVRLNEKGYVEIDHALPFSRTWDDSFNNKVLVLGSENQNKGNQTPYEYFNGKDNSREWQEFKARVETSRFPRSKKQRILLQKFDEDGFKECNLNDTRYVNRFLCQFVADHILLTGKGKRRVFASNGQITNLLRGFWGLRKVRAENDRHHALDAVVVACSTVAMQQKITRFVRYKEMNAFDGKTIDKETGKVLHQKTHFPQPWEFFAQEVMIRVFGKPDGKPEFEEADTPEKLRTLLAEKLSSRPEAVHEYVTPLFVSRAPNRKMSGAHKDTLRSAKRFVKHNEKISVKRVWLTEIKLADLENMVNYKNGREIELYEALKARLEAYGGNAKQAFDPKDNPFYKKGGQLVKAVRVEKTQESGVLLNKKNAYTIADNGDMVRVDVFCKVDKKGKNQYFIVPIYAWQVAENILPDIDCKGYRIDDSYTFCFSLHKYDLIAFQKDEKSKVEFAYYINCDSSNGRFYLAWHDKGSKEQQFRISTQNLVLIQKYQVNELGKEIRPCRLKKRPPVR

SEQ ID NO: 572 - protein, 1082 aa, Neisseria meningitidis
MAAFKPNPINYILGLDIGIASVGWAMVEIDEEENPIRLIDLGVRVFERAEVPKTGDSLAMARRLARSVRRLTRRRAHRLLRTRRLLKREGVLQAANFDENGLIKSLPNTLWQLRAAALDRKLTPLEWSAVLLHLIKHRGYLSQRKNEGETADKELGALLKGVAGNAHALQTGDFRTPAELALNKFEKESGHIRNQRGDYSHTFSRKDLQAELNLLFEKQKEFGNPHISDGLKEGIETLLMTQRPALSGDAVQKMLGHCTFEPTEPKAAKNTYTTERFIWLTKLNNLRILEQGSERPLTDTERATLMDEPYRKSKLTYAQARKLLELDDIAFFKGLRYGKDNAEASTLMEMKAYHAISRALEKEGLKDKKSPLNLSPELQDEIGTAFSLFKTDEDITGRLKDRIQPEILEALLKHINFDKFVQISLKALRRIVPLMEQGKRYDEACAEIYGDHYGKKNTEEKIDLPPIPADEIHNPVVLRALSQARKVINGVVRRYGSPARIHIETAREVGKSFKDRKEIEKRQEENRKDREKAAAKFREYFPNFVGEPKSKDILKLRLYEQQHGKCLYSGKEINLGRLNEKGYVEIDHALPFSRTWDDSFNNKVLVLGSENQNKGNQTPYEYFNGKDNSREWQEFKARVETSRFPRSKKQRILLQKFDEDGFKERNLNDTRYVNRFLCQFVADRMRLTGKGKKRVFASNGQITNLLRGFWGLRKVRAENDRHHALDAVVVACSTVAMQQKITRFVRYKEMNAFDGKTIDKETGEVLHQKTHFPQPWEFFAQEVMIRVFGKPDGKPEFEEADTPEKLRTLLTEKLSSRPEAVHEYVTPLFVSRAPNRKMSGQGHMETVKSAKRLDEGISVLRVPLTQLKLKDLEKMVNREREPKLYEALKARLEAHKDDPAKAFAEPFYKYDKAGNRTQQVKAMRVEQVQKTGVWVRNHNGIADNATMVRVDVFEKGDKYYLVPIYSWQVAKGILPDRAVVQGKDEEDWQLIDDSFNFKFSLHPNDLVEVITKKARMFGYFASCHRGTGNINIRIHDLDHKIGKNGILEGIGVKTALSFQKYQIDELGKEIRPCRLKKRPPVR

SEQ ID NO: 573 - protein, 1082 aa, Neisseria meningitidis
MAAFKPNPINYILGLDIGIASVGWAMVEIDEEENPIRLIDLSVRVFERAEVPKTGDSLAMARRLARSVRRLTRRRAHRLLRARRLLKREGVLQAADFDENGLIKSLPNTPWQLRAAALDRKLTPLEWSAVLLHLIKHRGYLSQRKNEGETADKELGALLKGVADNAHALQTGDFRTPAELALNKFEKESGHIRNQRGDYSHTFSRKDLQAELILLFEKQKEFGNPHVSGGLKEGIETLLMTQRPALSGDAVQKMLGHCTFEPAEPKAAKNTYTAERFVWLTKLNNLRILEQGSERPLTDTERATLMDEPYRKSKLTYAQARKLLGLEDTAFFKGLRYGKDNAEASTLMEMKAYHAISRALEKEGLKDKKSPLRLSPELQDEIGTAFSLFKTDEDITGRLKDRVQPEILEALLKHISFDKFVQISLKALRRIVPLMEQGKRYDEACAEIYGDHYGKKNAEEKIYLPPIPADEIRNPVVLRALSQARKVINGVVRRYGSPARIHIETAREVGKSFKDRKEIEKRQEENRKDREKAAAKFREYFPNFVGEPKSKDILKLRLYEQQHGKCLYSGKEINLGRLNEKGYVEIDHALPFSRTWDDSFNNKVLVLGSENQNKGNQTPYEYFNGKDNSREWQEFKARVETSRFPRSKKQRILLQKFDEDGFKERNLNDTRYVNRFLCQFVADRMRLTGKGKKRVFASNGQITNLLRGFWGLRKVRAENDRHHALDAVVVACSTVAMQQKITRFVRYKEMNAFDGKTIDKETGEVLHQKTHFPQPWEFFAQEVMIRVFGKPDGKPEFEEADTPEKLRTLLAEKLSSRPEAVHEYVTPLFVSRAPNRKMSGQGHMETVKSAKRLDEGVSVLRVPLTQLKLKDLEKMVNREREPKLYEALKARLEAHKDDPAKAFAEPFYKYDKAGNRTQQVKAVRVEQVQKTGVWVRNHNGIADNATMVRVDVFEKGDKYYLVPIYSWQVAKGILPDRAVVQGKDEEDWQLIDDSFNFKFSLHPNDLVEVITKKARMFGYFASCHRGTGNINIRIHDLDHKIGKNGILEGIGVKTALSFQKYQIDELGKEIRPCRLKKRPPVR

SEQ ID NO: 574 - protein, 1082 aa, Neisseria meningitidis
MAAFKPNSINYILGLDIGIASVGWAMVEIDEEENPIRLIDLGVRVFERAEVPKTGDSLAMARRLARSVRRLTRRRAHRLLRTRRLLKREGVLQAANFDENGLIKSLPNTPWQLRAAALDRKLTPLEWSAVLLHLIKHRGYLSQRKNEGETADKELGALLKGVAGNAHALQTGDFRTPAELALNKFEKESGHIRNQRSDYSHTFSRKDLQAELILLFEKQKEFGNPHVSGGLKEGIETLLMTQRPALSGDAVQKMLGHCTFEPAEPKAAKNTYTAERFIWLTKLNNLRILEQGSERPLTDTERATLMDEPYRKSKLTYAQARKLLGLEDTAFFKGLRYGKDNAEASTLMEMKAYHAISRALEKEGLKDKKSPLNLSPELQDEIGTAFSLFKTDEDITGRLKDRIQPEILEALLKHISFDKFVQISLKALRRIVPLMEQGKRYDEACAEIYGDHYGKKNTEEKIYLPPIPADEIRNPVVLRALSQARKVINGVVRRYGSPARIHIETAREVGKSFKDRKEIEKRQEENRKDREKAAAKFREYFPNFVGEPKSKDILKLRLYEQQHGKCLYSGKEINLGRLNEKGYVEIDHALPFSRTWDDSFNNKVLVLGSENQNKGNQTPYEYFNGKDNSREWQEFKARVETSRFPRSKKQRILLQKFDEDGFKERNLNDTRYVNRFLCQFVADRMRLTGKGKKRVFASNGQITNLLRGFWGLRKVRAENDRHHALDAVVVACSTVAMQQKITRFVRYKEMNAFDGKTIDKETGEVLHQKTHFPQPWEFFAQEVMIRVFGKPDGKPEFEEADTLEKLRTLLAEKLSSRPEAVHEYVTPLFVSRAPNRKMSGQGHMETVKSAKRLDEGVSVLRVPLTQLKLKDLEKMVNREREPKLYEALKARLEAHKDDPAKAFAEPFYKYDKAGNRTQQVKAVRVEQVQKTGVWVRNHNGIADNATMVRVDVFEKGDKYYLVPIYSWQVAKGILPDRAVVQGKDEEDWQLIDDSFNFKFSLHPNDLVEVITKKARMFGYFASCHRGTGNINIRIHDLDHKIGKNGILEGIGVKTALSFQKYQIDELGKEIRPCRLKKRPPVR

SEQ ID NO: 575 - protein, 67 aa, Neisseria meningitidis
MFGYFASCHRGTGNINIRIHDLDHKIGKNGILEGIGVKTALSFQKYQIDELGKEIRPCRLKKRPPVR

SEQ ID NO: 576 - protein, 220 aa, Neisseria mucosa
MRHIFSDGLKEGIETLLMTQRPALSGDAVQKMLGHCTFEPTEPKAAKNTYTAERFIWLTKLNNLRILEQGSERPLTNTERATLMDEPYRKSKLTYAQARKLLGLKDTAFFKGLRYGKDNAEASTLMEMKAYHAISRALEKEGLKDKKSPLNLSPELQDEIGTAFSLFKTDEDITGRLKTELTPASNKTLSRPFTVKSASNGSTSAPWLPSTKWFLHFKPA

SEQ ID NO: 577 - protein, 392 aa, Neisseria sp.
MAPFTLKPLNYILGLDIGIASVGWAVVETDSDVLPYRLIDVGVRTFDRAEVPKTGESPAAARRLARSVRRMIRRRAHRMLRARRLLKREGMLQAADFDAHGLVENLPVNPWQLRVDALSRKLMPLEWAAVLLHMVKHRGYLSQRKNERNSSDKELGALLSGVAANSEALQGGDFRTPAELAVNKFEKESGHIRNQRGDYSHTFNRKDVQAELVLLFEKQKEYGNPYISDGLLTGVEDLLMTQRAALSGDAVQKMLGRCTFEPEEYKAAKNTYSAERFVWLTKLNNLRILDQGSERPLTDSERAKLMDEPYKKTKLTYAQVRRLLELDDTAFFKGLRYSKDNAESATLMEMKAYHSISGALEKAGLKNKKIAAGLIARIAGRNRRGVFAIQNR

SEQ ID NO: 578 - protein, 701 aa, Neisseria sp.
MQDEIGEAFSLFKTDEDIRGRLKGKLPDEQLDALLEYVSFDKFVQLSLKALRKILPLMEQGKRYDEACAEIYGDHYGIKDDKQAQFLPPVSADEIRNPVVLRALSQARKVVNAVVRRYGSPARVHIETAREVGKSFLDRKKIEKRQEENRKDRERSIAKFREYFPNFVGEPKAKDILKMRLYEQQQGQCLYSGKAIDLRRLNEKGYVEIDHALPFSRTWDDSFNNKVLVLAGENQNKRNQTPFEWLGGDEKRWREFTARVEHCRFPRSKKQRILMQKLDEKDFKERNLNDTRYVNRFLCNFIAQNMLLTGEDKNRVFASNGQITNLLRGMWGLKKVRESNDRHHALDAVVVACSTVAMQQKITNYVRQKEMNVFDGEMVDKTTGEVSRLHFPQPWDFFRQEVMMRVFGKPDTPSENNEEADTPEKLRALLADKLSSRPEAVHEAVTPLFVSRAPSRKMSGQGHMETIKSAKRLSEGKSVLRVPLTQLTPKLLENMVNREREPQLYEDLLGRLNAHGGDPAKAFAAPFFKRDKAGNPTQQVKAVRVEDVQKSGVIVREGNGVADNATMVRVDVFEKGGKYYLMPIYTWQAAKGILPNKAVIAHTDEANWQEMDTSFTFKFALYPNDLVLASLKKETYFGYFAGLDRSTGNISLRVHDLEKSKGKDGVYRIGVKTALSFQKYQVDELGKTIRPCRLKKRPPVR

SEQ ID NO: 579 - protein, 1089 aa, Neisseria sp.
MTAFKPNPLNYILGLDIGIASVGWAMVEIDDKENPVRLIDLGVRVFERAEMPKTGDSLAAARRLARSVRRLTRRRAHRLLRARRLLKHEGVLKPEDFDENGLVKPLPYIPKQPRNTPWQLRAAALDRKLTPLEWAAVLLHLVKHRGYLSQRKNEGETDDKELGALLKGVADNTHALQAGNFRTPAELALNKFEKESGHIRNQRGDYSHTFSRKDLQAELVLLFEKQKEFGNPYVSDDLKNGIENLLMTQRPALSGDAIQKMLGHCTFEPAEPKAAKNTYTAERFIWLTKLNNLRILNQGNERPLTDAERTTLMDEPYKKSKLTYAQARKLLDLDDTAFFKGLRYGKDNAESATLMEMKAYHAISRALEKEGLKDKKSPLSLSPELQDEIGTAFSLFKTDEEITGRLKGCLQPEILDALLKHISFDKFVQISLKALRRIVPLMEQGKRYDEACAEIYGDHHGRRNSEETLYLPPIPADEIRNPVVLRALSQARKVINGVGRRYGSPARIHIETAREVGKSFKDRKEIEKRQEENRKDREKAAAEFQEYFPNFVGEPKSKDILKLRLYRQQNCKCLYSGKEINLGRLNEKGYVEIDHALPFSRTWDDSFNNKVLVLGSENQNKGNRTPYEYLNGKDNSREWQEFKARVETSRFPHSKKQRILLQKFDEEGFKERNLNDTRYVNRFLCKFVADHMQLTGKGKRRVFASNGQITNLLRGFWGLRKVRAENDRHHALDAVVVACSTVAMQQRITRFVRYKEMNAFDGKTVDKETGEVLHQKTHFPQPWEFFAQEVMIRVFGKPDGKPELEEADTPEKLRALLAEKLSSRPEAVHEYVAPLFVSRAPNRKMSGQGHMETIKSPKRLDEGISVVRVPLTQLKLKDLEKMVNREREPKLYEALKARLEAHKDDPAKAFAEPFYKQDKAGNRTQQVKAVRIEQVQKTGVWVRNQNGIADNATMVRVDVFEKGGKYYLVPIYSWQVAKGILPDKAIIAFKDEEEWQLIDDSFNFKFPLHPNDLVEVITKKARIFGYFASCHRGTGNINIRIHDLDNKVGKNGILEGIGVKTALSFQKYQIDELGKEIRPCRLKKRPPVR

SEQ ID NO: 580 - protein, 1097 aa, Neisseria wadsworthii
MKKQPQRYILGLDLGIASVGWALILVDGAENPVGLLDCGVRTFERAEVPKTGDSLALARRQARSVRRLIRRRAHRLLRLRRLLKREGILSAADFNSDGLPNLPIDAWQLRVAGLERKLTNQEWAAVLLHLVKHRGYLSQRKSETQTENKELGRLLAGVAENSKLLSESSEQYRTPAELAVKLFAEQSGHLRNKGGEYTHTFNRLDLQKELHLLFERQYALGNPFASAELQSKVDELLMTQRSALQGEAVLKMLGKCTFEPSEYKAAKNTYSAERFIWLTKLNNLRILYNGEERALDEGDRKKLLDEPYKKAKLTYKQVRSILNLPESAVFKGLRYGKDSDGLKAENGTLMEMKAYHKIRTILDKAGLKGEWENRIRNPEILDKIGTAFSLYKTDEDIQAALADLRLPENVLDALLAGLNFDKFIQLSLKALRNILPLMERGIRYDEACKEVYGDHRALAESKNQVLLPPIPADEIRNPVVLRTLTQARKVINAIIRRYGSPQRVHIETARELGKSKQERDKIDRKNKENQNDRNRLASDIRKHFNFEPTPKDILKLRLYEQQHGKCLYSDLREEKGECLYTGNVIELHRLFEDGYVEIDHALPLSRTWDNSLNNKVLVLKSSNQNKGNKTPYEWLDGANNSRRWREFQARVQGCHFPYVKKQRIQTAKLDSKAEQGFLERNLNDTRYISKFMCQFITANLRLAETSNALMEEVAGENPYWKERKRQRVFAPSGSIIALLRGLWGLKKVREDNDRHHALDAIVVACSTVSMQQKITKAMQRRETLETVDSETGEVKTRIPQPWDFFRQEVMIRVFSDSPREELAEKLNSRPEALHDFVSPLFVSRAPNRKMTGQGHLETVKSAKRLSENISVVRKPLTALKLKDIENIVGYPDREPALYQALRERLLAHKDDPVKAFADKPFYKPAKDGGQGSLVKAVRIIENTKHGLKIRNGITDTNGDMVRTDVYQKTDKKGKRQYFIVPVYAWQVEKNELPTVDCKGYEIDDNYEFCFSLYKYDLIEIQNPNDINQELRAYYINCDSSDGRFWLAYHDKSAKEQQFRISTQNQPIIKKYQVDTLGKEIRLCKAEKRTALNGKKKK

SEQ ID NO: 581 - protein, 1426 aa, Niabella soli
MPRKNILGLDLGTTSIGFAKIIEDDDYQCSSVELIGVRVNPLTTDEQTNFEKGKPVSVNADRTLKRGMRRNLDRYQLRRDYLIEILRTHHIITADTKLAEDGKNTTHTTYALRALAATAEIPLEAFVRVLLAINKKRGYKSSRKAKNEDEGQLIDGMAIARRLYEESLTPGQFSYQLLKEGKKYLPDFYRSDLNTELNKVWNFQKQFYPEILTDEFKRHLEGKGQRATAVAFWGQHGFSMAENKGSREEKKLHAYKWRSEAAHKQLTKEEVAFVITEINNDLNKSSGYLGAISDRSKELFFNKQTVGQYLHQQLKENPHTRLKGQVFYRQDYLDEFETIWEMQAKFYSALTLELKEEVRDVVIFYQRKLKSQMGLISLCEFESKEIEIEKNGEKAKKRIGLRVAPKSSPLFQEFKIWQVLNNLEFRNKKTKEVFVPEMAAKQQLFDELNIKGNLLASEAIKILGYKTKDWEANYHTLEGNRTNKSLYDAWLKILELEGYDENLLKLSGSDDIDVSKIEKPALEIRQMVLAVFEVLGISGAILDFDAEADGKAFEQQPAYQLWHLLYSAEDDGKKYSQEDIFTYGHDNIGLKKKLCEKFGFRPEHTKILVNVVFSDDYGNLSSKAMRRIYPFIKELTYDKACAEAGYRHSAASLTKEEIAARPLQNRLDLLKKNELRSPVVEKILNQMVNVVNTLVDDENQNRKARGLSEDFHFDEIRIELARELKKNAKERAEMTTNINTAKQSHEKIIRILQTEFGVPNPSRNDIVRYKLYEELKNNGYKDLYTNTYISRDILFSKQIDVDHIIPQMSLFDDSFSNKTVVFRKDNQDKGNKTAYDYILGKYGEQALEEYISRITSLFELGKKNKEEGIGKAKFQKLQKRLVDIGDGFIERDLRESQYIAKKANNMLYAICRSVVSTSGEITARLREDWDLVNVMQEINLPKFRALGLTEMVEKKDGAQKERITDWTKRNDHRHHAMDALAIAFTRHSHIQYLNHLNARKDEANKWHPVVSKIEEKETVLIYDDLGNRKRKFKAPMPNFREVVKEHLENVLISHKAKNKVVTKNKNKIKTVRGEKVKTELTPRGQLHKETIYGRYRYYESKEEKIGPKFDAEMIGMVTNPQYKKLLLERLAANGNDPKKAFWGKNALNKNPLYVDEARQELLPEKILLRWLNDDYSIRKDVTPENLKDIKTIEKILDKGVKKILLKRLADFGNDPKKAFSDLDKNPIWQNEAKRIAIKRVTISGIKNAAPLHHKKDHLGNDILDEKGKQIPSSFVSTGNNHHVAIYRDAEGNLQERVVSLFDAVQLVNGGEPVIDKEYNKGIGWQFLFTMKQNEMFVFPDEKTGFNPREVDLLSSGNRKLISPNLFRVQKLASKNYFFRHHLETSVEEKKELKNIAYKPQLGLNALSNIVKVRINHIGEIVSVGEY

SEQ ID NO: 582 - protein, 79 aa, Nitritalea halalkaliphila
MPLRLPERVYKMISSTGAECHFLPVNVSSLIKGYDAKSKLGEFGSQNKQEVTSDSFIRVKERCYKLEINRLGIPLNRLK

SEQ ID NO: 583 - protein, 1498 aa, Odoribacter laneus
METTLGIDLGTNSIGLALVDQEEHQILYSGVRIFPEGINKDTIGLGEKEESRNATRRAKRQMRRQYFRKKLRKAKLLELLIAYDMCPLKPEDVRRWKNWDKQQKSTVRQFPDTPAFREWLKQNPYELRKQAVTEDVTRPELGRILYQMIQRRGFLSSRKGKEEGKIFTGKDRMVGIDETRKNLQKQTLGAYLYDIAPKNGEKYRFRTERVRARYTLRDMYIREFEIIWQRQAGHLGLAHEQATRKKNIFLEGSATNVRNSKLITHLQAKYGRGHVLIEDTRITVTFQLPLKEVLGGKIEIEEEQLKFKSNESVLFWQRPLRSQKSLLSKCVFEGRNFYDPVHQKWIIAGPTPAPLSHPEFEEFRAYQFINNIIYGKNEHLTAIQREAVFELMCTESKDFNFEKIPKHLKLFEKFNFDDTTKVPACTTISQLRKLFPHPVWEEKREEIWHCFYFYDDNTLLFEKLQKDYALQTNDLEKIKKIRLSESYGNVSLKAIRRINPYLKKGYAYSTAVLLGGIRNSFGKRFEYFKEYEPEIEKAVCRILKEKNAEGEVIRKIKDYLVHNRFGFAKNDRAFQKLYHHSQAITTQAQKERLPETGNLRNPIVQQGLNELRRTVNKLLATCREKYGPSFKFDHIHVEMGRELRSSKTEREKQSRQIRENEKKNEAAKVKLAEYGLKAYRDNIQKYLLYKEIEEKGGTVCCPYTGKTLNISHTLGSDNSVQIEHIIPYSISLDDSLANKTLCDATFNREKGELTPYDFYQKDPSPEKWGASSWEEIEDRAFRLLPYAKAQRFIRRKPQESNEFISRQLNDTRYISKKAVEYLSAICSDVKAFPGQLTAELRHLWGLNNILQSAPDITFPLPVSATENHREYYVITNEQNEVIRLFPKQGETPRTEKGELLLTGEVERKVFRCKGMQEFQTDVSDGKYWRRIKLSSSVTWSPLFAPKPISADGQIVLKGRIEKGVFVCNQLKQKLKTGLPDGSYWISLPVISQTFKEGESVNNSKLTSQQVQLFGRVREGIFRCHNYQCPASGADGNFWCTLDTDTAQPAFTPIKNAPPGVGGGQIILTGDVDDKGIFHADDDLHYELPASLPKGKYYGIFTVESCDPTLIPIELSAPKTSKGENLIEGNIWVDEHTGEVRFDPKKNREDQRHHAIDAIVIALSSQSLFQRLSTYNARRENKKRGLDSTEHFPSPWPGFAQDVRQSVVPLLVSYKQNPKTLCKISKTLYKDGKKIHSCGNAVRGQLHKETVYGQRTAPGATEKSYHIRKDIRELKTSKHIGKVVDITIRQMLLKHLQENYHIDITQEFNIPSNAFFKEGVYRIFLPNKHGEPVPIKKIRMKEELGNAERLKDNINQYVNPRNNHHVMIYQDADGNLKEEIVSFWSVIERQNQGQPIYQLPREGRNIVSILQINDTFLIGLKEEEPEVYRNDLSTLSKHLYRVQKLSGMYYTFRHHLASTLNNEREEFRIQSLEAWKRANPVKVQIDEIGRITFLNGPLC

SEQ ID NO: 584 - protein, 1389 aa, Oenococcus kitaharae; identical to SEQ ID NO: 241

SEQ ID NO: 585 - protein, 1535 aa, Ornithobacterium rhinotracheale
MNTILGLDLGTNSIGWALIKVLNDKTRLPLEIIDLGVVVIPTDQRTLDKFSKGESISKTAERTKQKGVRKLYERKKLRRERLHRVLNILGFLPEHYSKKIDFKKHLGQFFGNSQPKISYVENDHGKHEFIFMDSYREMLKEFSKHNIKNVPYDWTIYYLRKKALSQKISKEELAWVILNFNKKRGYYQFRDDNADENKENKIEKYYALKVTNVKKEDAQNYTITLENGWIYKNKSKISLLDWVGSTKEFISTEKFDNKGNIIKKKNGEDDRTLKLVDSEKDWIAIKKSTEDRIENYGKTVGTYLYEHLLKDPNQKLNGELINIIDRKFYKNELKQILEKQKEFHPELLNEDLFQKSIIELYPKNSTRQKELKNKDLCYLLIDDVIYYQRDLKKKNSTINKCSFESREYYLNGEKQIQKINCIAKSKPLYQEFRTLQFIKNLKVYEIIDGLEKDITSKLLPDFETKEHFFEWLNDKEKIDQLQLLSYKCFDLHDNVKNDLIAKGIKRPTEKAIRTELLEKYRWNYSKDNDRNFLLNETRFKILKYLKKVDKKLTLTNEQIESLWLLLYSAKDERELKNGLQKFSEKNKLPKKFSDIFISFPPFKKEYGAYSEKALKKLLSLVRFGKYWSFNKIDNNIQNKIMNILNGEVDDSISDRVREKTILLQDKNDFQDLPLWLASYVAYNRFSEVSEIKYWDSPDKIEFLKQHSIGNPIVEKIINETLKLIKDIWVIHGKSCKNFFSEIHIELSREIKSSSKKRAQITNNNTKNQKLNNLIKSLLIEMASDTKYENVTPYSPSQQEILKIYDEGIYSKEENSEKIKEINKIRNNNKISKSDITKYKLWLEQGYISPYTGKIIPLTKLFTAKYQKEHIIPQTKFFDDSFNNKVICEAEVNKLKDNSLAMNFIKAKGGKAVKLSDGETVTILNQEEYKQLVRTSFKKNSIKLRNLLLEEIPDTFTKRQLNDTKYISKLVLSLLSNIVREKGELESTAKRIVSTNGQITSILRNDWGLNNIWNKLITPRFERLNNINKNKIYGNWENKKGKNVFQINYLNDNLSTLNTKRIDHRHHALDALIVACTTRNHINFLNNQYAKSRNQRHDLRAKLKRRETITTEGSKKQVFKDFIKPWESFTQDALKKLETTIVNFKVNKRIINKTINWYKKWEKQKDGTYKKIQKKQTKGDAWAIRKPLHIDTIYGIVCKKLPLKSALENYKNIIDENLKHKIKELKEVNKFDNNQIINFFKECNFIFEDNNIQKVEVYDFKDNRDKTILSSSRQLIDESFTPKKIGKVLDPTIRNILLKHLNSTKYNNKFDSDGNPIKPEKLAFSPEGLKDLNKNIKHLNNNKEHQPIKRVKLFETLGNKIKVGYTQQKNKKFAETATGTNLFLGIYSDNNKRDFKTIPLILAIQREKEGLNPCPDTDEKGNQLLFSLSPNELVFVPNNEERKNPNLVDFENLSKDQIDRIYKFVSCTGSEAYFVPSRTAKPIIENENGTNNKSQRIIEFNEKTSIKNEKNEPVLIKTICWKIEVNRLGKIIKVIK

SEQ ID NO: 586 - protein, 103 aa, Parabacteroides merdae
MIVYRLFYRFLFKATKLVNFVIHKELKRQIARTGKIKFHSGGCGCQSGNYKMQNFEKGKSITTNADRTLKRSMRRNLYRCKLRRDVLIELLKKVGFIPEKQWK

SEQ ID NO: 587 - protein, 82 aa, Parabacteroides merdae
MSIWKLQYPPLDLKIYNKFLVYSRVNPLTVDEMQNFEKGKSITTNADRTLKRSMRRNLQRYKLRRDVLIELLKKVGFMSEKQ

SEQ ID NO: 588 - protein, 84 aa, Parabacteroides merdae
MSIWKLQYPPLDLKIYNKFLVYSRVNPLTVDEMQNFEKGKSITTNADRTLKRSMRRNLYRCKLRRDVLIELLKKVGFIPEKQWK

SEQ ID NO: 589 - protein, 398 aa, Pasteurella bettyae
MLANENQNKGNLTPYEWLDGKNNSKRWQDFVARVQTCCFSHRKKQHILSHKLDEKSFIERNLNDTRYVARFLCNFIADNMLLTGKGKRKVFASNGQITALLRGRWGLQKVRDDNDRHHALDAVVIACSTVAMQQKITRFVKYEEGNVFSGERIDRETGEIIPLYFPTPWKFFKENVEIRIFSENPKLELENRLPDYPQYNHEFVQPLFVSRMPTRKMTGQGHMETIKSAKRLDEGISVLKVPLTQLKLADLENMVNRERELALYEALKERLELFGNDPAKAFIEPFYKKGGALVKAVRVKKVQKSGVLVRDGNGVADNALMVRVDVFTKGGKYFLVPIYTWQVAKGILPNKAVTANIDEIDWLEMDESYQFIFTMYPNDLVKVKLKKEEFFGYYGGLD

SEQ ID NO: 590 - protein, 610 aa, Pasteurella bettyae
MNMLKPLNYILGLDLGIGSVGWAVVEIDEQGNPLRLIDVGVRTFERAEVAKTGESLALARRLARSSRRLVKRRAARIKKAKRLLKAENILLSVDEILPNDVWQLRVKGLDHKLERQEWAAVLLHLLKRRGYLSQRKNESKSENKELGALLSGVVTNHQILQTDEYRTPAEIAVHKFQAEDGHIRNQRGDYTHTFSRLDLLAEMELLFQRQTELGNLHTSSKLLENLTALLMWQKPALAGEAILKMLGKCTFEPTEYKAAKNSYSAERFVWLTKLNNLRILEQGAERALTDSERFVLLDQPYEKAKLTYAQVRTLLKLSDEAIFKGVRYQGEDKKTVESKTTLMEMKAYHQIRKALDGADLKDEWNTLKNDSALLDEIGTAFSLYKTDDDISHYLGGKLSEKVLNVLLENLNFDKFIQLSLKALQKILPLMLQGQRYDEAVSAVYGDHYGKKSAESCRLLPAIPANEIHNPVVLRTLTQARKVINAVVRLYGSPARIHIETGRKVGKSYQDRKKLEKQQEENREQRESAVKKFKEYFPNFVGEPKGKDILKLRLYELQQSKCLYSGKSFDPNRLLEKGYVEVDHALPFSRTWDDSFNNKVCLPMKTRIKAI

SEQ ID NO: 591 - protein, 199 aa, Pasteurella multocida
MACATPSMQQKITRFIRFKEVHPYKIENRYEMVDQESGEIISPHFPEPWAYFRQEVNIRVFDNHPDTVLKEMLPDRPQANHQFVQPLFVSRAPTRKMSGQGHMETIKSAKRLAEGISVLRIPLTQLKPNLLENMVNKEREPALYAGLKARLAEFNQDPAKAFTTPFYKQGGQQVKAIRVEQVQKSGVLVRENNGVADNA

SEQ ID NO: 592 - protein, 63 aa, Pasteurella multocida
MQTTNLSYILGLDLGIASVGWAVVEINENEDPIGLIDVGVRIFERAEVPKTGESLALSRRLAR

SEQ ID NO: 593 - protein, 1058 aa, Pasteurella multocida
MQTTNLSYILGLDLGIASVGWAVVEINENEDPIGLIDVGVRIFERAEVPKTGESLALSRRLARSTRRLIRRRAHRLLLAKRFLKREGILSTTDLEKGLPNQAWELRVAGLERRLSAIEWGAVLLHLIKHRGYLSKRKNESQTNNKELGALLSGVAQNHQLLQSDDYRTPAELALKKFAKEEGHIRNQRGAYTHTFNRLDLLAELNLLFAQQHQFGNPHCKEHIQQYMTELLMWQKPALSGEAILKMLGKCTHEKNEFKAAKHTYSAERFVWLTKLNNLRILEDGAERALNEEERQLLINHPYEKSKLTYAQVRKLLGLSEQAIFKHLRYSKESAESATFMELKAWHAIRKALENQGLKDTWQDLAKKPDLLDEIGTAFSLYKTDEDIQQYLEGKLPDSVINALLVSLNFDKFIELSLKSLRKILPLMEQGKRYDQACHEIYGHHYGEKNQQISQLLPVIPTQEIRNPVVLRTLSQARKVINAIIRQYGSPARVHIETGRELGKSFKERREIQKQQEDNRTKRESAVQKFKELFSDFSSEPKSKDILKFRLYEQQHGKCLYSGKEINIHRLNEKGYVEIDHALPFSRTWDDSFNNKVLVLASENQNKGNQTPYEWLQGKINSERWKNFVALVLGSQCSAAKKQRLLTQVIDDNKFIDRNLNDTRYIARFLSNYIQENLLLVGKNKKNVFTPNGQITALLRSRWGLIKVRENNDRHHALDAIVVACATPSMQQKITRFIRFKEVHPYKIENRYEMVDQESGEIISPHFPEPWAYFRQEVNIRVFDNHPDTVLKEMLPDRPQANHQFVQPLFVSRAPTRKMSGQGHMETIKSAKRLAEGISVLRIPLTQLKPNLLENMVNKEREPALYVGLKARLAEFNQDPAKAFATPFYKQGGQQVKAIRVELVQKSGVLVRQGNGVADNAPGSIVRTDVFIKNNKFFLVPIYTWQVAKGILPNKAIVAHKNEDEWEEMDEGAKFKFSIFPNDLIELRTKTECFLGYYIGPDRHNGSISLREHDSEISKGNAGVYRVGVKLALSLEKYHIDELGKNRRICRPHQRRPVR

SEQ ID NO: 594 - protein, 1056 aa, Pasteurella multocida
MQTTNLSYILGLDLGIASVGWAVVEINENEDPIGLIDVGVRIFERAEVPKTGESLALSRRLARSTRRLIRRRARRLLLAKRFLKREGILSTTDLEKGLPNQAWELRVAGLERRLSAIEWGAVLLHLIKHRGYLSKRKNESQTNNKELGALLSGVAQNHQLLQSDDYRTPAELALKKFAKEEGHIRNQRGAYTHTFNRLDLLAELNLLFAQQHQFGNPHCKEHIQQYMTELLMWQKPALSGEAILKMLGKCTHEKNEFKAAKHTYSAERFVWLTKLNNLRILEDGAERALNEEERQLLINHPYEKSKLTYAQVRKLLGLSEQAIFKHLRYSKENAESATFMELKAWHAIRKALENQGLKDTWQDLAKKPDLLDEIGTAFSLYKTDEDIQQYLTNKVPNSVINALLVFLNFDKFIELALKSLRKILPLMEQGKRYDQACREIYGHHYGEANQKTSQLLPAIPAQEIRNPVVLRTLSQARKVINAIIRQYGSPARVHIETGRELGKSFKERREIQKQQEDNRTKRESAVQKFKELFSDFSSEPKSKDILKFRLYEQQHGKCLYSGKEINIHRLNEKGYVEIDHALPFSRTWDDSFNNKVLVLASENQNKGNQTPYEWLQGKINSERWKNFVALVLGSQCSAAKKQRLLTQVIDDNKFIDRNLNDTRYIARFLSNYIQENLLLVGKNKKNVFTPNGQITALLRSRWGLIKIRENNDRHHALDAIVVACATPSMQQKITRFIRFKEVHPYKIENRYEMVDQESGEIISPHFPEPWAYFRQEVNIRVFDNHPDTVLKEMLPDRPQANHQFVQPLFVSRAPTRKMSGQGHMETIKSAKRLAEGISVLRIPLTQLKPNLLENMVNKEREPALYAGLKARLAEFNQDPAKAFTTPFYKQGGQQVKAIRVEQVQKSGVLVRENNGVADNASIVRTDVFIKNNKFFLVPIYTWQVAKGILPNKAIVAHKNEDEWEEMDEGAKFKFSLFPNDLVELKTKKEYFFGYYIGLDRATGNISLKEHDGEISKGKDGVYRVGVKLALSFEKYQVDELGKNRQICRPQQRQPVR

SEQ ID NO: 595 - protein, 134 aa, Pasteurella multocida
MVNKEREPALYAGLKARLAEFNQDPAKAFTTPFYKQGGQQVKAIRVEQVQKSGVLVRENNGVADNASIVRTDVFIKNNKFFLVPIYTWQVAKGILPNKAIVAHKNEDEWEEMDEGAKFKFSLFPNDLVELKTKK

SEQ ID NO: 596 - protein, 53 aa, Pasteurella multocida
YSKENAESATFMELKAWHAIRKALENQGLKDTWQDLAKKPDLLDEIGTAFSLL

SEQ ID NO: 597 - protein, 1366 aa, Pediococcus acidilactici
MGDRKYNLGLDIGTSSIGFAAVDENNQPIRVKGKTAIGVRLFEEGKTAADRRGFRTTRRRLSRRRWRINLLNEIFDAHLAEVDPTFLARLKESNRSNLDPKKSFQGSLLFPERKDYQFYEEYPTIYHLRKALMEEDRKFDIREIYLAVHHIIKYRGNFLNGTPMRSFKVENIELDTLFDQLNQLYAEIVPDNELAFDLAQVADVKDVLSSTTIYKMDKKKQLVKMMLLPASNKALQSENKKIVTQFVNAILNYKFKLDVLLQVETDADWSLKLNDEGADDKLEEFTGDLDENRLEIIDLLQRLHNWFSLNEITKDGNSLSAAMVEKYENHHHHLGLLKKVIENHPDAKKAKALKETYTAYVGKTDDKTQNQDDFYKAVEKNLDDSPDAKEIKRLIQLDQFMPKQRTGQNGAIPHQLHQQELDQIIEKQSKYYPFLAEPNPNVKRRKDAPYKLDELIAFKIPYYVGPLVTPEEQAQNKENVFAWMKRKAAGPITPWNFDEKVDRMESANRFIRRMTTKDTYLFGEDVLPAESMIYQKFVVLNELNNLKINGRHLSLKDKQDVYNDLFKQQKTVSIKALQNYYVTKKKAATAPTVGGLADPKKFLSSLSTYIDFKNMFGERVNDPQFQEDLEQIVEWSTIFEDRGIFKAKLQALGWLSEKQIQQLVAKRYKGWGRLSKKLLTGLKNAEGYSILDEMWRSTENFMQIQTRPEFAALIQQANEKQFEGNDPNNVWENIESILGDAYTSPQNKKAIRQVVKVVQDIEKAVGNPPEKIAIEFTREAAANPQRTQSRLRTLEKLYESAEEVVDAGLTAELAEFKENKHVLSDKYYLYFTQLGRDVYTGDTISLDKLNDYDVDHILPQSFIKDDSLDNRVLTIRAVNNGKSDNVPAKMFGKKMGSFWRYLLDNGMISKRKYNNLITDPDNISKYAQKGFINRQLVETSQVIKLTANILNGIYDKDTEIIEVPAKMNSQMRKMFDLVKVREVNDYHHAFDAYLTIFIGKYLYKCYPKLRPYFVYGKFKKFGDNEDIEVGDGRFNFLNRIERLKNVTDPETGEILWSNVAPNETIKQIKKVYNYKFMLVSRETTTRRAELFNQTVYPKNYRGKLIPIKEDRPTDLYGGYSGNTDAYLAIVALEDKKKGKYFKVVGIPTRAAAKLEKLKQQDSQQYLQALHKVIAPQFTKSTKKGIKKTEFEIVLDKVHYRQLVQDGPVKMMLGSSTYKYNAKQLVLSEKALQVIADDRKFDETQKDDNLIAVYDEILSIVNQSFDLYDINGFRKKLNDNRDQFIDLPAETKYEGRKVVAHGKREMILEILKGLHANAAFGNLKPIGFSTAFGQLQVPNGIILSKNAILIHQSPSGLFERKIKLSDL

SEQ ID NO: 598 - protein, 1229 aa, Pediococcus acidilactici; identical to SEQ ID NO: 130

SEQ ID NO: 599 - protein, 270 aa, Pediococcus lolii
LFNQTIYSAKASKTMIPIKNDRPTKLYGGYSGNEDAYMSIIRLSDKKKTYKVVGISMRDASKLKAYENNAHEEYLKKLKEVIEQQFLDSGKKTKADFEIVIPKVNYHQRMQDGTKQFRIGSSKYVHNTKQLVLSEKTLKAIRNNKQYNGDAEKDLINAFDEILTIVNDSFSIFDIRSFRKKLNESRDKFVSLPVEDTKEKSKVIKGKRETLKQILIALHANGTSQDIPQLGLKSFGKMVKTGGLTLSENTALIHQSPSGLFEHKIKLSDL

SEQ ID NO: 600 - protein, 1016 aa, Pediococcus lolii
MNGIFDAHLAEVDPTFLARLKESNRSNLDPKKSFQGSLLFPERKDYQFYKEYPTIYHLRKALMEKDRKFDIREIYLAVHHIIKYRGNFLNGTPMRSFKVENIELDTLFDRLNQLYEEIIPDNELAFDLEQVADVKEVLSSTTIYKMDKKKQLVKMMLLPASNKALQSENKKIVTQFVNAILNYKFKLDVLLQVETDADWSLKLNDEGADDKLEEFTGDLDENRLEIIDLLQRLHNWFSLNEITKDGNSLSAAMVEKYKDHRHHLELLKKVIEDHSDAKKAKALKETYTAYVGKTDDKTQNKDDFYKAVEKNLDDSPEAKEIKRLIQLDQFMPKQRTGQNGAIPHQLHQQELDQIIEKQSKYYPFLAEPNPNVKRRKDAPYKLDELIAFKIPYYVGPLVTPEEQAQNKENVFAWMKRKAAGPITPWNFDEKVDRMESANRFIRRMTTKDTYLFGEDVLPAESMIYEKFVVLNELNNLKINGRHLSLKDKQDIYNDLFKQQKTVSIKALQNYYVTKKKAATAPTVGGLADPKKFLSSLSTYIDFKNMFGERVNDPQFQEDLEQIVEWSTIFEDRGIFKAKLQALGWLSEKQIQQLVAKRYKGWGRLSKKLLTGLKNAEGYSILDEMWHSTENFMQIQTRPEFAALIQQANEKQFEGNDPDNVWENIENILGDAYTSPQNKKAIRQVVKVVQDIEKAVGNPPEKIAIEFTREAAANPQRTQSRLRTLEKLYESAEEVVDAGLTAELAEFKENKHVLSDKYYLYFTQLGRDVYTGDTISLDRLNDYDVDHILPQSFIKDDSLDNRVLTIRAVNNGKSDNVPAKMFGKKMGSFWRYLLDNGMISKRKYNNLITDPDNISKYAQKGFINRQLVETSQVIKLTANILNGIYDKDTEIIEVPAKMNSQMRKMFDLVKVREVNDYHHAFDAYLTIFIGNYLYKCYPKLRPYFVYDNFKKFGNKEDIGHKRFNFLGKIERDKKVVAPETGEILWSNVAPNETIKQIKKVYDYKFMLTSHETYTKHG

SEQ ID NO: 601 - protein, 1333 aa, Planococcus antarcticus
MKNYTIGLDIGVASVGWVCIDENYKILNYNNRHAFGVHEFESAESAAGRRLKRGMRRRYNRRKKRLQLLQSLFDSYITDSGFFSKTDSQHFWKNNNEFENRSLTEVLSSLRISSRKYPTIYHLRSDLIESNKKMDLRLVYLALHNLVKYRGHFLQEGNWSEAASAEGMDDQLLELVTRYAELENLSPLDLSESQWKAAETLLLNRNLTKTDQSKELTAMFGKEYEPFCKLVAGLGVSLHQLFPSSEQALAYKETKTKVQLSNENVEEVMELLLEEESALLEAVQPFYQQVVLYELLKGETYVAKAKVSAFKQYQKDMASLKNLLDKTFGEKVYRSYFISDKNSQREYQKSHKVEVLCKLDQFNKEAKFAETFYKDLKKLLEDKSKTSIGTTEKDEMLRIIKAIDSNQFLQKQKGIQNAAIPHQNSLYEAEKILRNQQAHYPFITTEWIEKVKQILAFRIPYYIGPLVKDTTQSPFSWVERKGDAPITPWNFDEQIDKAASAEAFISRMRKTCTYLKGQEVLPKSSLTYERFEVLNELNGIQLRTTGAESDFRHRLSYEMKCWIIDNVFKQYKTVSTKRLLQELKKSPYADELYDEHTGEIKEVFGTQKENAFATSLSGYISMKSILGAVVDDNPAMTEELIYWIAVFEDREILHLKIQEKYPSITDVQRQKLALVKLPGWGRFSRLLIDGLPLDEQGQSVLDHMEQYSSVFMEVLKNKGFGLEKKIQKMNQHQVDGTKKIRYEDIEELAGSPALKRGIWRSVKIVEELVSIFGEPANIVLEVAREDGEKKRTKSRKDQWEELTKTTLKNDPDLKSFIGEIKSQGDQRFNEQRFWLYVTQQGKCLYTGKALDIQNLSMYEVDHILPQNFVKDDSLDNLALVMPEANQRKNQVGQNKMPLEIIEANQQYAMRTLWERLHELKLISSGKLGRLKKPSFDEVDKDKFIARQLVETRQIIKHVRDLLDERFSKSDIHLVKAGIVSKFRRFSEIPKIRDYNNKHHAMDALFAAALIQSILGKYGKNFLAFDLSKKDRQKQWRSVKGSNKEFFLFKNFGNLRLQSPVTGEEVSGVEYMKHVYFELPWQTTKMTQTGDGMFYKESIFSPKVKQAKYVSPKTEKFVHDEVKNHSICLVEFTFMKKEKEVQETKFIDLKVIEHHQFLKEPESQLAKFLAEKETNSPIIHARIIRTIPKYQKIWIEHFPYYFISTRELHNARQFEISYELMEKVKQLSERSSVEELKIVFGLLIDQMNDNYPIYTKSSIQDRVQKFVDTQLYDFKSFEIGFEELKKAVAANAQRSDTFGSRISKKPKPEEVAIGYESITGLKYRKPRSVVGTKR

SEQ ID NO: 602 - protein, 211 aa, Porphyromonas catoniae
MGKKVLGLDLGVGSIGWCLITLDKDEKPQSILGMGSRIVPLSADDATEFTQGKAITKNKMRTVARTIRKGMDRYQLRREALKKVLREHAMLPDEALIKLPLLELWELRARAATPGEQVSLTELGRVLLHINQKRGYKHAKADEAAEAETKKGKETGYVAQVKGRYQILKEKGLTIGQHFAGELRANQQTAPRGTYYTYRIKEQVYPRVRGV

SEQ ID NO: 603 - protein, 1009 aa, Porphyromonas catoniae
MRIIREAYIEEYDRIMAVQRVFYPELLTDALIGRIRDRIIFYQRPLKSCKQLVSFCEFEKKEKVIRVKHTNKEGVQELVEKTITIGPKVAPKSSPIFQVCKVWESIHNIRLYHPDGTERKLEQEEKQKLFDYLQRNDKLSLTTLRKELKIKPKDKLWCDKLLEKGIAGNTTAAILRKAFKGYEHYERLFRFDLVRRDSHEADEDGVIRPIIDESYQNEPLYKLWHILYSIEDRAEMRSALIGQLGIKAEDLDNGLMDALYKIDFVKQGYGNKSAKFICKLLPHLQEGKMYSEAAEAAGMRHSDSMTAQERDERNLLEEIPLLQKNALRQPVVEKVLNQMINLVNALKREHGEIDEVRVELARELKMSREEREKATKNNSSREKENKAIAERITEYGLTPTKSRIQKYRLWQESAESCIYCGKRVDVVQFLRGEETEVEHIIPKSILFDDSLSNKACACRSCNQEKGNRFAMEYIQAKGWEQDYIERVDSLFHDKKISYSKRQHLLMLPKDLPEDFIERHLRLSQYISREAQGILRKGIRLVSASEGGVTAKLRQLWGYDNILRDLNLERYKSMGETEVVTVEHRDGQRTDERIKDWSKRKDHRHHAIDALVVACTRQSYIQRLNRVNAEADRQEMDAFIKEQQQEHKLSKKEKLSLLENWLKEQPHFTTGEVKEHAEGILISFRPGKRTVSRGRNIYKRSGKTDVQRNVLIPRGALSEETVYGVISVDGENKVVCKYPLQKFLDTKETNVDKIADQAAEKIVDKVLREKIRERIKRYGKKEAFAEPLYLDEAQTQVVRSVRCFISKDQAKLIPLRYNDESEAVGFVAPGNNHHLALYRDASGKMRASVVSFFAAVERARYGIPMIVLNPRETREKARIIPDLPESIFSKLPEEDWVLEETLQEGEMVLLGMENDAIEEAIKKKDYSKLSRYLYRVQSLSYNDYKFCFHLETESEKKEKKKGEDKKRGEKAKNTAVMPPKRYRIRCLATYQEDLNPRKVKIDLLGRISLA

SEQ ID NO: 604 - protein, 1197 aa, Porphyromonas sp.
MLMSKHVLGLDLGVGSIGWCLIALDAQGDPAEILGMGSRVVPLNNATKAIEAFNAGAAFTASQERTARRTMRRGFARYQLRRYRLRRELEKVGMLPDAALIQLPLLELWELRERAATAGRRLTLPELGRVLCHINQKRGYRHVKSDAAAIVGDEGEKKKDSNSAYLAGIRANDEKLQAEHKTVGQYFAEQLRQNQSESPTGGISYRIKDQIFSRQCYIDEYDQIMAVQRVHYPDILTDEFIRMLRDEVIFMQRPLKSCKHLVSLCEFEKQERVMRVQQDDGKGGWQLVERRVKFGPKVAPKSSPLFQLCCIYEAVNNIRLTRPNGSPCDITPEERAKIVAHLQSSASLSFAALKKLLKEKALIADQLTSKSGLKGNSTRVALASALQPYPQYHHLLDMELETRMMTVQLTDEETGEVTEREVAVVTDSYVRKPLYRLWHILYSIEEREAMRRALITQLGMKEEDLDGGLLDQLYRLDFVKPGYGNKSAKFICKLLPQLQQGLGYSEACAAVGYRHSNSPTSEEITERTLLEKIPLLQRNELRQPLVEKILNQMINLVNALKAEYGIDEVRVELARELKMSREERERMARNNKDREERNKGVAAKIRECGLYPTKPRIQKYMLWKEAGRQCLYCGRSIEEEQCLREGGMEVEHIIPKSVLYDDSYGNKTCACRRCNKEKGNRTALEYIRAKGREAEYMKRINDLLKEKKISYSKHQRLRWLKEDIPSDFLERQLRLTQYISRQAMAILQQGIRRVSASEGGVTARLRSLWGYGKILHTLNLDRYDSMGETERVSREGEATEELHITNWSKRMDHRHHAIDALVVACTRQSYIQRLNRLSSEFGREDKKKEDQEAQEQQATETGRLSNLERWLTQRPHFSVRTVSDKVAEILISYRPGQRVVTRGRNIYRKKMADGREVSCVQRGVLVPRGELMEASFYGKILSQGRVRIVKRYPLHDLKGEVVDPHLRELITTYNQELKSREKGAPIPPLCLDKDKKQEVRSVRCYAKTLSLDKAIPMCFDEKGEPTAFVKSASNHHLALYRTPKGKLVESIVTFWDAVDRARYGIPLVITHPREVMEQVLQRGDIPEQVLSLLPPSDWVFVDSLQQDEMVVIGLSDEELQRALEAQNYRKISEHLYRVQKMSSSYYVFRYHLETSVADDKNTSGRIPKFHRVQSLKAYEERNIRKVRVDLLGRISLL

SEQ ID NO: 605 - protein, 1422 aa, Prevotella denticola
MTQKVLGLDLGTNSIGSSVRNLDLSDDLKGQLEFFSSDIFRSSVNKESNGREYSLAAQRSAHSRSRGLNEARRRKLWATLDLLIKYGFCPMSPESLMRWRTYDKQRGLFREYPIDDKNFNAWILLDFDGDGKPDYSSPYQLRRELVIRQFDFDQPIERYKLGRALYHIAQHRGFKSSKGETLSQQETNSKQSLTDDTADVAGEMKASEEKLSKGLSTYMKENNLLTVGAAFAQLEDEGVRVRNNNDYRAIRSQFQREIETIFKFQQGLSVENELYERLVSEKKNIGTIFYKRPLRSQRGNVGKCTLERTKPRCAIGHPLFEKFRAWTLINNIKVRMSEEEQAEQLPMKLRFELYNDCFLAFVRAEFKFEDIRKYLEKRLGVHFSYNDKTINYKDSTSVAGCPITARFRKLLGEDWESFHVDGQKQRQAHGKNNASFHTVSYSTNDIWHFCYDAEEPEAVLSFAQDNLKWEKKKAEELVRIWSAIPQGYAMLSQKAIRNINKMLILGLKYSDAVLLAKVPEIVEITDGEILSVTEDYHRVEAQVGYEKQINNIVNALIAKYKSASEEYRFADHNYEYQLDKSDEKDIIKQIESNIGTRKWSLLDADEQTDILQKVRDKYQNFFRSHERKFVESPKLGECFEEYLMKKFPMVEGERWKKLYHPSQIAIYRPVPANKDRSALRLGNPDIGAIKNPTVLRVLNTLRKRVNQLLDDGIISPDETRVVVETARELNDANRKWALDTYNRIRHDENEKIKKILAEFYPKRDNISTVDIDKARYVIDQREMDYFTEAKTYHKDIKKYKLWLEQGGQCMYTGRTINLSNLFDPNSFDVEHTIPESISFDSSDMNLTLCDAHYNRFIKKNHIPADLPNYDKSVVIDGKEYSPIKPRLQRWADRVERLNRNVEYWRGQARRAQNKDRKDQCMREMHLWKMELEYWTKKLERFTITEVTDEFKNSQLVDTRVITRHAVLYLKSIFPHVDVQRGDVTAKFRKILGIQSVDEKKDRSLHSHHAIDATTLTIIPGAAKRERMLELFAKIEEVNKMLSFSGNEDRTGLKQELDGLKNQLNKEVKACRIGHNVSEIGTFINDNIIINHHVKNQALTPVRRRLRKRGHIVGGMDNPRWQTGDALRGEIHKASYYGAITQYAKDKEGKVLMKEGRPQINPTIKFVIRRELKYKKSSTDSGFASWDDLGKAIVDKELFALMKGQFPEGTSFKDACEQGIYMIKKGKNGEVDTKLYRIRHIRCKTKQKNALKIKEQAYKSEKEYKRYFYAAVGDLYAMCCYTNGKTREFKIYSLYDISCHRKVGVEDIPEFITDKKGNRLMLDYKLHTGDMILLYKENPEELYDLDNVSLSKLLYKINGFENDGLRIRMVNHLVAKEAMGESVKDYAKLPDIIRCGVKTIKFLVMGENRDFVIKNGKISFNHR

SEQ ID NO: 606 - protein, 443 aa, Prevotella disiens
MELDYWKGKYNRFTMTEIPEGFSRRQGMGIGLISRYAGLYLKTIFHKKDNPQKSNVYIVKGSITAEFRRIWNIQDDYEKKCRDNHIHHCIDAIVVGCIGKREYDLMAQFYRDEEKYRWEKKKKPFFKKPWETFTQDMLSLKDEVLTVHFNPSNFTKKAHKKVFTPKGIFVAQGDCARVKLHKESYFGAIEQKGEIKYVMRKELSALKIEDIKNIVDAVVKEKVLAVVKKKGFKQAMAEPIYMNEDKRILIKKVRLFVSQTNPLIVKKHRDLSSKEYKQNYYVDNEGNLMIAMYEGVKKNGKIDREITVVNNLEAAKFFRQSQKNNAEKQLISHLSPKNGYPLKTVLTQKQLVLMYEDSPKEIKLRDTKNMVKRLYQVVEIEKDGRVKLKFHQEARSEGLNKNSAAFKIQDTPESLYRHTKSNLKVLVNGVDFKINILGEISLI

SEQ ID NO: 607 - protein, 1375 aa, Prevotella histicola
MKKILGLDLGTTSIGWALVYESENTDEKSSIVRLGVRVNPLSVDEKGNFEKGKAITTNADRQQTHGARINLQRYKLRRENLKDCLQKQGWIGTEALCEEGKTSTFETYMLRAKAAEEEISLHELCRVLFMMNKKRGYKSNRKANNKEDGKLFDGMTVAKKLYEEHLTPAEYSFQLLSSGKKFKQEYYRSDLKEEFDRIWNEQQKYYPEILTDDFKQQLQGKSKGNTSKIFLGKYGIYSADLKGLDRKLQPLKWRVEALKQQVDKEVLAFVISDLNGQIASTSGLLGAISDRSKELYFNKQTVGQYLWTSLKETPHVSIKNKPFYRQDYLDEFEKIWETQATYHKELTPELKQEIRDIIIFYQRPLKSKKGLISVCELEQRKVKVTIDGKEKEISIGPKVAPKSSPMFQEFRIWQNLNNILLIDKGNNSIHPLYEEEKNLLYEELSVKEKLSKAEALKVLNKNSKQWDLNYKEIEGNRTQAVLYDCYNRIIVMTGHEEYNFKKLKASEIRSYVKTTFTGLGFNTDILEFDSSLTGHELEKQPMYQLWHLLYSYESDNSRTGNDALLRKLETAFGFPKEYAAVLSDVVFEDSYGNLSVKAMRKILPHLQAGLNYSQACEEAGYKHSRRSLTKNELDQKEYKEKLELLPKNSLHNPVVEKILNQMINVINAVIDEYGKPDEIRIELARELKIGAAERENMTRSINQGNAENKRIREILEKEFALSYISRNDIIKYKLYEELKSNGFKTLYSDTYISKDKLFSKDFDIEHIIPKARLFDDSLSNKTIEARDVNIAKSNKTAFDFISEKYDQQGIEAYKKKLDILLQDGSISKAKYNRLLMKEADIPSGFIDRDLRDTQYIAKKAYEILSDLVRNVTPTTGAVTSRLREDWQLVDVMKELNFEKYQKLGLVEVIEDRDGRKIKRIKDWTKRNDHRHHAMDALTIAFTKPSYIQYLNNLNARSDKNSSIYGIENKELHREDNKLRFNAPLPINEFRAEARRHLKSILVSVKAKNKVMTQNVNVIKTKHGVIKKVQLTPRGELHNATFYGTKKRPIIKMVKVGAALDEVTIKKVSSSFIREALLDRLHEYNGDAKKAFTGRNSIDKNPIYIDEEHKKTVPALVKTIEWEMYHPTRKLISPDLKIDKVIDKGIREILKTRLAKFNGDAQKAFSNLDENPIYKDEAKKITLKRVSLEGVSSVIPLHTLKDREGKLVVGKDGKPVLGDYVQTSNNHHIAFYMDENGNLQDNVVSFFEAAERKSQGVPVIDKNYNHDKGWNFLFTMKQNEYFVFPNEVTGFNPSEVDLMDEANYSIISPNLYRVQKMSKASGRDYWFRHHLEAMLNDDPKLRNSMFKRITSLKALEGIVKVRINCIGKIVAVGEYD

SEQ ID NO: 608 - protein, 1380 aa, Prevotella intermedia
MKRILGLDLGTTSIGWALVNEAENNNEASSIVRLGVRVNPLTVDEKSNFEKGKAITTNADRQLRHGARINLQRYKLRRQNLHDCLQKQGWLGTEAMYEEGKASTFETYKLRAKAAEEEISLHEFARVLFMLNKKRGYKSNRKANNKEDGQLFDGMTIAKKLYEEHLTPAEYSLQLLNKGKKFTQGYYRSDLNAELERIWDEQKKYYPEILTDEFKQQLEGKTKTNTSKIFLAKYGIYSADLKGLDRKFQPLKWRVEALQQQVDKEVLAFVISDLKGQIANTSGLLGAISDRSKELYFNKQTVGQYLWASLEENPHISIKNKPFYRQDYLDEFEKIWETQAAFHKQLTPELKQEIRDIIIFYQRPLKSKKSLISVCELEQRKVKATIDGKEKEITIGPKVAPKSSPVFQEFRIWQNLNNVLLIDNDTNEKRPLDEVERNLLYKELSIKAKLSKTEALKILNKKGKQWDLNYRELEGNRTQAILFDCYNRIITLTGHEECDFKKIKASEIRHYVSTIFKNLGFSTEILDFDPSLKKHELEKQPMYQLWHLLYSYESDNSRTGNESLLRKLETTFGFPEEYATVLCDVVFEEDYGNLSVKAMREILPYLQAGNDYSQACAYAGYNHSRHSLTKEELDQKVYKERLELLPKNSLRNPVVEKILNQMINVINAIIDEYGKPDEIRIEMARELKSSAADRKKTTHAISQGNAENQRIREILEKEFSLSYISRNDIIKYKLYEELEPNYYKTLYSDTYITKDKLFSKDFDIEHIIPKARLFDDSFSNKTLEARNINLEKSNKTAFDFIKEKYGEDGAEAYKKKLDMLLENDAISRPKYNNLLRAEADIPSDFINRDLRNTQYIAKKACEILGELVKTVTPTTGKITNRLREDWQLVDVMKELNFEKYEKLGLTEIVEDRDGRKIKRIKDWTKRNDHRHHAMDALAIAFTKPSFIQYLNNLNARSNKGDSIYAIENKELHYEEGKLRFNAPIPVNEFRAEAKRHLSAILVSIKAKNKVMTQNVNKIKTKHGIIKKIQLTPRGPLHNETIYGTKMRPIIKMVKVGAALDEATINKVSSPAIREALLKRLNEYSGNAKKAFTGKNTLEKNPIYLNAGRTKTVPSLVKTVEWESFHPTRKLIDKDLNVDKVVDKGIREILKARLEEFNGDAKKAFSNLEENPIYLDEAKKIALKRVSIEGVLSAIPLHTLKNQAGKPITGKDGKPVLGNYVQTSNNHHIAFYYDEDGNLQDNAVSFFEAAERKSQGIPVIDKDYNRDKGWRFLFTMKQNEYFVFPNEATGFIPSEVDLTDEANYGIISPNLYRVQKVSRIDKGTSASRDYWFRHHLETILNDDAKLKNLAFKRIRGLLELKDIIKVRINSTGKIVAVGEYD

SEQ ID NO: 609 - protein, 129 aa, Prevotella multiformis
MQKGGTGCKINRQTVGNVEVNVLNLRLYDRTDDREVTAGYLPTKEDYVRLFVYLNDRKEINQDTLLKDYFRLKKVKCGNEKEFAIRWNYIEDKEKKYPCNETRHELLAALDRAGMEHGWLDDSGTSARW

SEQ ID NO: 610 - protein, 535 aa, Prevotella multiformis
MVKGLLSNIVRTAEEREETSKFVISCTGRITDRLKQDWGLNDVWNSLVYTRFKRLNELTETEAFGHWQDKDRRVFQTSVPLELQRGFSKKRIDHRHHAMDALVIACASRNIIGYLNNESAESPEKREDLRRKLCDKNHIIRKPWESFTQDARAALEDIVVSFKNYVRIINKATNYYERYDADGRKTKAEQKGGEMWAVRKPMHEATYYGKVNLRRKERVSLKAALEDIPSICNRDLRDYINGLVEKHFNKEQVLAQFRSVGNRWNKQHIDKVDVWRFSDGKEEMVATRKPLDTSFDAKRIEAVTDTGIQRILSNYLEAKGGDPKIAFTPEGIADMNQHITAYNNGKQHKPILKVRVSTKLGKKYPVGQTGCKAGQFVVAEAGTNLYFAVYEDGEGNRSYDTIPLNEAVECLKQGLPPVPETREKGDRLKFYLSPNDLVYVPAGDEENEIDRERIYKFVDSSGTTANFIPHRTAGLIYNVDKKLAEALCNGSIIQNEYGVGSQQSKNQKALTGEMVKAVCWKLEVDRLGNILRIIK

SEQ ID NO: 611 - protein, 1380 aa, Prevotella nigrescens
MKRILGLDLGTTSIGWALVNEAESNNEASSIVRLGVRVNPLTVDEKSNFEKGKAITTNADRQLRHGARINLQRYKLRRQNLHDCLQKQGWLGTEAMYEEGKASTFETYKLRAKAAEEEISLHEFARVLFMLNKKRGYKSNRKANNKEDGQLFDGMTIAKKLYEEHLTPAEYSLQLLNKGKKFTQGYYRSDLNAELERIWDEQKKYYPEILTDEFKQQLEGKTKTNTSKIFLAKYGIYSADLKGLDRKLQPLKWRVEALKQQVDKEVLAFVISDLKGQIANTSGLLGAISDRSKELYFNKQTVGQYLWASLEENPHISIKNKPFYRQDYLDEFEKIWETQATFHKQLTPELKQEIRDIIIFYQRPLKSKKSLISVCELEQRKVKATIDGKEKEITIGPKVAPKSSPVFQEFRIWQNLNNVLLIDNDTNEKRPLDEDERYLLYKELSIKAKLSKTEALKILNKKGKQWDLNYKELEGNRTQAILFDCYNRIITLTGHEECDFKKIKASEIRHYVSTIFKNLGFSTEILDFDPSLEKHELEKQPMYQLWHLLYSYESDNSRTGNESLLRKLETTFGFPEEYATVLCDVVFEEDYGNLSVKAMRKILPYLQAGNDYSQACAYAGYNHSRHSLTKEELDQKVYKERLELLPKNSLRNPVVEKILNQMINVINAIIDEYGKPDEIRIEMARELKSSAADRKKTTHAINQGNDENQCIREILEKEFALSYISRNDIIKYKLYEELKPNGFKTLYSDTYIPKDKLFSKDFDIEHIIPKARLFDDSYSNKTLEARDINLAKSNKTAFDFVKEKYGEQGAEAYKKKLDMLLGNNVISKPKYNKLLMTEADIPSDFINRDLRNTQYIARKACEILGELVRTVTPTTGKITNRLREDWQLVDVMKELNFEKYEKLGLTEIVEDRDGRKIKRIKDWTKRNDHRHHAMDALAIAFTKPSYIQYLNNLNARSNKGDSIYAIENKELHYEEGKLRFNAPIPVNVFRAEAKRHLSAILVSIKAKNKVMTQNVNKIKTKHGIIKKIQLTPRGPLHNETIYGTKMRPIIKKVKVGAALDEATINKVSSPAIREVLLKRLNEYSGNAKKAFTGKNTLDKNPIYLNAERTKTVPASVKTVEWENYHPIRKPITPDLKVDKVIDKGIGEILKARLEEFNGDAKKAFSNLEENPIYLDQTKKIALKRVSIEGVLSTIPLHTLKNQAGKPIMGKDGKPVLGNYVQTSNNHHIAFYYDEDGNLQDNAVSFFEAAERKSQGISVIDKDYNRDKGWRFLFTMKQNEYFVFPNEATGFIPSEVDLTDEANYGIISPNLYRVQKMSRIEKGTSVSRDYWFRHHLETILNDDSRLKNSAFKRINSLKPLEGIIKVRINSIGKIVAVGEYD

SEQ ID NO: 612 - protein, 1506 aa, Prevotella nigrescens
MKTILGLDLGPNSIGWAKVEVDDEGNYLRNIKLGSRIIPMTQDMLGDFDKGVKVSQTAIRTDFRGNRRLIERHLLRRERLHRVLHALKFLPKHYEDAIGWDRNEPATYGKFVNNSEPKLAWERQEDGSMRFLFMESFNEMVADFAQNQPSLVSDGKKIPLDWTIYYLRKKALTRPIKKEELAWILLNFNQKRGYYQLRGEEEEDNLTKRKEYYKLKVVGVEADGAPKGGKTWYNIHLENGWTARCQSKIPLDDWVGKVKEYIVTTEYEDDGKTPKCDKEGKVKRSFKSPEKDDWQLIKTRTEKFIDDSNKTVGAFIYDYLLEKPFDKIRGKYIRTIERKYYKNELREILREQTKYHEGLHSLEALKICAEELYKNNQQHQEYLLKKDMTFLLLNDLIFYQRPLKSKKSLIADCPYEVYKYDDKLTGKKGQKKIKCIAKSNPYYQEFRLWQFIANLRLFSVTDGKEVTAEYLKTEEDYVRLFSFLNDRKDIKQETFLRSFLKLKKESIGSEKIYPIRWNYIEDANKSYPCNATRHELLLAFDRADIPRELLDVEEREYRLWHLLYSIEAKEETESALRKLKANKAFGDLNIDDAFVNSFLKIKPFEKEYGAYSEKAIKKLLAVMRRGSLWKEADICEATKQNIAKILQNDIDEKLKKKIEAAVSSFNKLSDFQGLPTWLACYVVYGRHSEAAQIQCWQSPEDLKTYINKFKQHSLRNPIVEQCLLETLRTVYDIWKDAGQIDEIHIELGRNMKSTAEQRARKTKDILRNENTNLRIKNLLVELKNDDKIENVRPYSPSQQEILRIYEEGALQELSKEDEMFEDISKISKMAQPSPTELSRYKLWLEQKYRSPYTGRVIPLSKLFTTAYQIEHIIPQSRYFDDSFNNKVICESEVNSLKDNMLGYEFIKECGGRIVHCTLLGDVKIFTKEEYKDFVTKHYIDNTYKRDKLLLEDIPQEFSARQLNDSRYISKMVQTVLSNIVRAENEQEATSKFVVSCNGAITNRLKKDWGLNDVWSSIVCPRFKRLNEITKTNAFGHWEDKAGKHVFQTTVPLELQRGFSKKRIDHRHHAMDALVIACASRNIVNYLNNESANSPEKREDLRKKLCDEKRKIRKPWKTFTQDAREALSDVVVSFKNYVRVINKATNYYEHYSSSGNKVMISQKGNDMWAIRKPLHKESVFGRVNLCRKVIVSLKKALENIPAICDKTLRDYINALVEKHFNTRQLLAHFKSINYRLNRQCVEKVEVWQFSDEKIEMVARRKSLDTSFDDKQISSITDTGIQKILLNYLQTKDGNAEIAFTPEGIEEMNKNISLYNDGKAHQPILKVRVATPKGMKYPVGQTGNKATKFVVAEKGTNLYFAIYENELGVRSYDTIPLNIVVERLKEGLSPVPQANEADIPLKFYLSPNDLVYVPTKENEDELCRDRIYKFVDSSGTTANFVPHTSANTIYNVDKEYAEKCCNGAVFLNEYGLGSPQSKNQRALTGEMIKEICWKLKVDRLGNIIKVIK

SEQ ID NO: 613 - protein, 774 aa, Prevotella oulorum
MEQCILETLRTVYDIWKEAGQIDEIHVELGREMKQTAEQRAHLTEKVLRNENTNLRIKSLLMELKNDADMKDVRPYSPMQQEILRIYEEGALQTLSKDDAAFTEIMKISKMAQPSASELQRYRLWLEQKYRSPYTGKPISLSKLFTSAYQIEHIIPKKRYFDDSFSNKVICEAEVNGKKDSMLAYEFIKDCGGDVIHCTTLGDVTILSEAEYKALVTELYANNKSKKDKLLMEDIPQDFINRQLNDSRYISRVVMTLLSNIVRIEGEEEATSKFVIPCSGGITDKLKKDWGLNDVWNNIVYPRFERLNALTNTSDFGQWENKEGKRVFQTSVPLELQRGYQKKRIDHRHHAMDALVIACASRKIINYLNNQEANDPTKQENARKQLCIKSRIIRKPWETFTQDAYKALDNIVVSFKNYVRVINKATNYYERYNADGKKAVDEQKGEAMWAIRKPMHKDTVFGHVNLRRKAVVKLKDALENIPAICDKTLRHYIQDLQKKHFNTKQLLAHFKSINYRLNKQAVDKVEVWQYSDDKEQLAATRKPLGPSFDAKCIAAITDTGIQKILLNYLQAKGGDPAIAFTPEGIAEMNQNIAVYNGGKQHQPILKVRIAKPMGKKFPIGQTGNKAFQYVIAEEGTNLYFAIYEDEEGNRTYDTIALREVVERLKQGLTPVPEKNEKGVALKFHLSPNDLVYVPTADELLSKVCSLDKNRIYKMVSATKSECLFIPHSVAKTIYDKVEFEALNKMGRALTGEMIKSVCWKIEVDRLGHIVNIIK

SEQ ID NO: 614 - protein, 691 aa, Prevotella oulorum
MKTILGLDLGTNSIGWAKVIVDDNENYLRDIQLGSRIIPMSQDVLGKFDKGVTESQTAIRTSFRGVRRLRERTLQRRERLHRVLHTLHYLPPHYDSAIGWDRKTPTTYGKFLNHGEPKLAWERREDGTMQFLFMDAFHEMIADFAKYQPALVADGKKVPLDWTIYYLRKKALTQPIKKEELAWILLNFNQKRGYYQLRGEEDEENAAKHEEYHELKVVGVEVDEAGKGDNTWYNVKLENGWTYHRQSKIPLDDWVGKVRAFIVTTEYEKDGTTPKKDKEGNVKRSFRSPDEKDWGLRKKQTEHSLEASGTPVGAFIYDHLLKEPSDKIRGKFIHTIERKYYKQELAAILREQSKHHEKLCSKDMLKACIEELYPNNPLHRESLLKKDMPYLLIEDLIFYQRPLKSKKSLIAECPYEAYSYVDKETGEMKRQGIKCIAKSNPYYQEFRLWQLIANLRLRNRSDERDVTAEYLPHQEDYVRLFTYLNDRKEINQETLLKDFFKLKKVTIGGEKVFPIRWDYIEDKEKKYPCNATRHELLLALDRAGIEHDWLNDRDLAYRLWHLLYSVDSKDETERALRKLKDDDAFVESFLKIKPFEKEYGAYSEKAIKKLLPVMRRGSLWNEADLCPSTKERIANILQGTIDEKLKKKIGAFISSCQQVSDFQGLPEWLACYVVYGRHSEATDIQRWETPE

SEQ ID NO: 615 - protein, 242 aa, Prevotella saccharolytica
MKLVLGLDLGVGSVGWALIFITDSGEPIKILALGERIVSMDSNNSNEFSAGATCTLNQKKTKAKSVRKGYSRYVQRRDALTAELRHIGMMPDETLIKLPVLDLWQLRANAATEGKKLSLAEIGRVLYHINQRRGYKHGKSDVSSDNKQKGYVKAVNERYCMIQERQQTIGQYFALKLKETAVTTEKGTFYTFRIKDQVFPREAYEEEFVVAYSTKVLKFKQITTLLNVVICLMMLLLIVQRY

SEQ ID NO: 616 - protein, 1174 aa, Prevotella sp.
MEFHPELCDAELLKACAEELYRNNEAHRAQLLAKDFKHLLVEDVLFYQRPLKSKKSLIANCPYETRQYINKETGEIKDVNVKCIAKSNPYFQEFRLWQWISNLRLLRQADGQDVTAAYIKGNEDKERLFDLLNNQGEIKQEHILRDFLKLKKPKGGEFPLRWNYVDDKIYPANETRHAINKAIKGMAVDKEEKETLGQLLDQPAVAYMLWNLLYSITDRNELARALRRFALTHGVSSVDAFVESFLKVKPFKKEYGAYSEKATKKLLQVMRLGKYWCGDELPEPAKRTKGNKQAVYDEMAHRGICKQTLQNISNIIEENIDERLMGALLNPERPLTELSHFQGLSVSDACYVVYGRHSEVAEIVKWKDADELNTFINNFKQHSMRNPIVEQCVLETLRTVRDVWEQEGQIDEIHVELGRNMKRTAEQRARDTQAIQRNENTNMRISLLLTELKNDPSISDVRPYSPSQRELLKIYEEGALENLTNQDEDIAKISRLAQPSASELRRYKLWLDQKYVSPYTGRPIPLAKLFTPAYEIEHIIPQSRYFDNSFSNKVICEAEVNKLKDNLLGMEFIKKFGGKTKGILDEEAYKLHVTTNYAHNPAKRSKLLMEDLPTDFNSRQLNDTRYISKTVMALLSNVVREEGERETRSKHVVVCTGGVTDTLKKDWGLHDVWHNLVYPRFIRLNNLTGSQNFGYWRYLNEENSKKGEDSKKVFQITLPPECQRGFVKKRIDHRHHAMDALVIACASANIVNYLNNQSAANPHIHENLQRLLCDRKREIRKPWPTFTQDAQAALKDLVVSFKNTVRVVNKASNTYLRYDKDGKKKRFKQEGEGLKAIRKPMHKETYYGEVNLIRKEMVPLKRALDDVNAIVDKELRASIKGLLRDGFNPQQVLANFKAKDFKFDKRDIKKVEVYVSSEKSTPMVATRKSLDTSFNAKRIADITDTGIQKILLNYLKANDNSPEQAFTPEGIAYLNEHIAEYNDGKPHQPILKVRVSEVKGAKFAVGQTGSKKDKFVEAQSGTNLYFAIYEDKEGKRHFETIALKVAAERLKDKQMPVPEINDAGLPLKFYLSPNDLVYVPTDEDRATAHPSIDKMRIYKMVSATDRQCFFLPFTVASVISNKVEFEALNKMERVLDASEYSSAYDSSHVNKVMVKNVCWKLEVDRLGNITKIVR

SEQ ID NO: 617 - protein, 992 aa, Prevotella sp.
MITRILGLDTGTNSLAWAVVDRDANGNYTLVKRGDVIFTEGVKIEKGIESSKAAERTAHKALRVHYSRRRLHKIDTLKVLVELNLCPCLSDEQLSQWKAKKTYPLTDDFMLWQRSGSAEENNPYYCRHRCLTQKLDLTDQSQRFLLGRAFYHLAQRRGFLSNRLDTSADSDESGKVKSGIAQLSVEMEKAGCEFLGEYFYQLYKQHGNTIKLRSRYTDREEHYKKEFLAICEKQELDPKWVEALQRAIYFQRPLKSQRKGVGKCTFEPKKPRCAESHPDYEAFRMLCFLNNVKIQTPNDTSLRPLNEDEREKIWPIFFRKSKPNFDFEDIAKALAGKNNYAWYKDAGEKPFKFNYRMQQGVSGCPVTAQLIDIFGSDWQTAIAETYTAVEKKNGTKTIDEMADDVWNVLYSFSSKDKLKAFATEKLQLDEASATKFANAKLPHGFASLSLKAIRNILPFLRQGFIYAHAVHLAKIPDIVTKAVWNDADKREMILSGLMEIIENYNPKDRGVEGTIDFCIKSHLQDVIDLRPGAADALYHPSMIETYPDAKLNKMGVFQLGSPRTNAIRNPMAMRSLHILRSVVNQLLRDGIIDRDTEVHVEYARELNDANKRKAIADYQREQEKKRKQYRDDIIALYKSECHKEIEPTDTDILKFQLWEEQNHLCLYTGTQIGICDFLGDNPKFDIEHTVPRSVGGDSTQMNLTLCDATFNRQVKGAQLPSQLSNHADILVRIDHWKSKCEDLRKQLDKIRTYGGMEKNMKDRLIQKRHRLKMDLDYWQGKYSRFTMTEVPEGFSRRQGAGIGLVSKYAGLFLKSLFHNEQNPNKSNVYVVKGVTTAEFRRMWGLQGEYEKKSRLNHCHHCIDAITIACIGKAEYDKMAQYYHDEELFQWRGTTTKPHFNKPWPTFTEDVLAIEQSLLVKHLTKDNMPKQAKKRVRTATGKYLAQGDTARGSLHKDTYYGAIEQNGEIRYVLRKPLNKFENEAELEKIVDQA

SEQ ID NO: 618 - protein, 1375 aa, Prevotella sp.
MKKILGLDLGTTSIGWALVNESENKDEQSSIVRLGVRVIPLTVDEKGNFEKGKAITTNADRQQVHAARINLQRYKLRRENLRDCLQKQGWIGSEPMCEDGKSSTFETYKLRAKAAVEEVSLHEFARVLFMLNKKRGYKSNRKANDKEEGKLFDGMTIAKKLYEEHLTPAEYSLQLLNTGRKFTPEYYRSDLIEEFEKIWNEQQKYYPEILTDEFKQQLEGKAKSNTSKLFLGKYGIYSADTKGLDRRLQPLKWRVEAMKQQVDKDVLAFVISDLKGQIANTSGLLGAISDRSKELYFSKQTIGQYLWASLQENPHISIKNQPFYRQDYLDEFEKIWETQATYHKELTSELKQEIRDIIIFYQRPLKSKKNLIAVCELEQRKVKVTVDGKEKEITIGPKIAPKSSPMFQEFRIWQNLNNILLLDHETNSKRPLYEEERNLLYEELSVKEKLSKTEALKVLGKKSKQWDLNYKELEGNRTQAVLYDCYNRIIVMSGHEECNFKKLKASDIRHYVKMIFKNLAFNTDILCFDSSLKGHELERQPMCQLWHLLYSYEGDNSRTGNDALLRKLETSFGFPKEYAAVLADVIFEDSYGNLSVKAMRNILPHLQAGKDYSQACEEAGYKHSRRSLTKEELNQKVYKEKLELLPKNSLHNPVVEKILNQMVNVINAVIEEYGKPDEIRIELARDLKIGAAERENMTRSINQGNAENKRIREILEKEFALSYLSRNDIIKYKLYEELKSNGFKTLYSDTYISKDKLFSKDFDIEHIIPKARLFDDSLSNKTIEARDVNIAKSNKTAFDFILERYGEQGVKTYKTKLLRLLEDGAISNKKYNNLLKTEADIPSGFIDRDLRNTQYIAKKAYEILSELVKIVTPTTGSVTNRLREDWQLVDVMKELNFEKYQKLGLADVIEDRDGRKVKRIKDWTKRNDHRHHAMDALTIAFTKPSYIQYLNNLNARSDKSSSIYGIEVKELHREEGKFRFNAPLPINEFRAEAKRHLKSVLVSIKAKKKVMTQNVNKIKTKHGIIKKVQLTPRGELHNATYYGTKKRPLVRMVKVGAALDEATIKRVCSPAIRAALLKRLNAYNGDAKEAFTGRNSIDKNPIYLDIEQTKLVPVLVKTIEWGMYHPIRKRITPDLKIDKVIDKGIREKLKARLAEFNGDAQKAFSNLDENPIYMDEAKRITLKRVSIEGVLSAIPLHTLKDKAGKPVIGSDGKPVFGDYVQTSNNHHIAFYIDDKGNLQDNPVSFFEAAERKSQGVPVIDRRYNCDKGWHFVFTMKQNEYFVFPNEATGFIPSEVDLLDEANYCIISPNLYRVQKLSKASGRDYWFRHHLETMLNDDLRLKNSTFKRIQSLKGLEDIVKVRINSIGKIVAVGKYD

SEQ ID NO: 619 - protein, 1483 aa, Prevotella sp.
MKTILGLDLGTNSIGWAKVSVDDYGNYLHDIKLGSRIIPMSQDVLGNFDSGVTVSQTAQRTEFRSKRRLVQRNLQRRERLHRVLHVLDFLPAHYDAAIGWDRTEAVTYGKFLNHAEPKLAWEELGNGKRRFLFMDSFHEMVADFARCQPALVADGKKIPLDWTIYYLRKKALTQAITKEELAWILLNFNQKRGYYQLRGEEEEENPTKQEEYYELKVVSVEATDSRKGNDTWYNVHLENGWIYRRSSKISLDDWVGKVKQFIVTTEYEKDGTTLKTDKEGNVKRSFRAPNENDWGLRKKRTETLLEMSGKTVGAFIYDHLLQEPADKIRGNFIRTIERHYYKAELEAILAEQCKYHIELRDKEMLEACARELYLNNLPHQRSLMKKDMTYLLLYDLIFYQRPLKSKKALIANCPYEYYEYVDKETGEIKRQNIKCIAKSNPYFQEFRLWQFVLNLRLFDRVEDKEVTANYLPTADDHARLFTYLNDRKEINQETLLKDYFKLKKVKIGNEKEYPIRWNYIEDKEKKYPCNETRYELLMALDRAGIEHKWLDDNNLEYRLWHLLYSVEVKSESETALRKLKNDDAFVNSFLKVKPFKKEYGAYSEKAIKRLLAVMRKGFLWNEQDICDETRKRIEIIIKGDVDEKVKERMGHAAYSFDRVSDFQGLPEWLACYVVYGRHSEAMDIQRWDSPERLMAYINNFKQYSLRNPIVEQCILETLRTVHDIWKETGQIDEIHVELGREMKSTSEERARRTQNVLRNENTNLRIKSLLIELKNDTDICNVHPYSPMQQEILRIYEEGALQELNREDEDFEEISKISQMSQPSGKELNRYKLWLEQKYRSPYTGKAISLAKLFTPAYQIEHVIPQSRYFDDSFTNKVICEAEVNTLKSNLLGYEFIKKHGGEIIHCTTLGDVRIFSESEYKAFVMDHYANNKSKKDKLLMEDIPQEFLSRQMNDSRYISKVVKTLLSNIVRMADESEATSKSVIVCTGGVTDRLKKDWGLNDVWNSIVYSRFERLNRLTGTEAFGHWENKDGKRVFQTSMPLELQRGFRKKRIDHRHHAMDALVIACASRNIVNYLNNESANNPKKREDLRRQLCDKNRVIRKPWETFTQDAYNALENVVVSFKNYVRVINKATNRYEHYDENGKKRFVQQKGSELWAIRKPMHKETYYGHVNLRRKELVTLQKALDDIPSICDKKLRDYISALVEKHFNKRQLLAHFKSTDYYWQKQYVNKVYVWTFSDDIKPLVATRKLLDTSFDAKRIGTITDTGIQKILRNYLEAKGGNATLAFTPEGIVEMNQNISKYNDGKPHQPILKVRITEPMGAKYRVGQTENKMAKYVEAQSGTNLYFAIYEDSEGKRSYTTVPLDEVAERLKQRLSPVPEKDENDVPLKFYLSPNDLVYVPTEEELQLRECKLNKDRIYKMVSSTGSECHFIPYYVANVIYNKVEFEAKNKIGRALTGEMIKAVCWKLEIDRLGNILKVIK

SEQ ID NO: 620 - protein, 593 aa, Prevotella sp.
MNTRILGLDTGTNSLAWAVVDRDAKGNYTLVRRGDVIFTEGVNVDGQPVPSKAAVKSKYKSLRVQYARRRLRKIDTLKVLVSLDLCPYLSDQQLSQWKAKKTYPLTDDFMLWQRSGSAEENNPYYCRYRCLTQKLDLTDQSQRFLLGRAFYHLAQRRGFLSNRLDTTSDSAESGKVKSGIAQLSVEMEKAGCTFLGEYFYQLYKQHGNTVRLRSRYTDREEHYIKEFLAICEKQELDAQWVEKLQRALYFQRPLKSQRKGVGKCTFEPKKPRCAESHPDYEAFRMLCILNNIKIKTPKDVSLRPLNAEEREKVWPLFFRKSKPNFDFEDIAKALAGKNNYAWYKDAGEKPFRFNYRMHQGVSGCPVTAQLIDIFGSDWKAGIAETYTAVGKKNGTKTIDEMADDVWNVLYSFSSKDKLKAFATDKLQLDEARATKFANAKLPHGFAALSLKAIRNILPFLRQGFIYAHAVLLAKIPDIVTAAVWDDADKREQILSGLLEVIENYNPDDRGIEGTIDFCIKSHLQDVVDLRPGAADALYHPSMIEAYPDAKLNKMGVFQLGSPRTNAIRNPMAMRSLHILRSVVNLLLRDGMLS

SEQ ID NO: 621 - protein, 1424 aa, Prevotella sp.
MTQKVLGLDLGTNSIGSAVRNLDLSDDLQWQLEFFSSDIFRSSVNKESNGREYSLAAQRSAHRRSRGLNEVRRRRLWATLNLLIKHGFCPMSSESLMRWCTYDKRKGLFREYPIDDKDFNAWILLDFNGDGRPDYSSPYQLRRELVTRQFDFEQPIERYKLGRALYHIAQHRGFKSSKGETLSQQETNSKPSSTDEIPDVAGAMKASEEKLSKGLSTYMKEHNLLTVGAAFAQLEDEGVRVRNNNDYRAIRSQFQHEIETIFKFQQGLSVESELYERLISEKKNVGTIFYKRPLRSQRGNVGKCTLERSKPRCAIGHPLFEKFRAWTLINNIKVRMSVDTLDEQLPMKLRLDLYNECFLAFVRTEFKFEDIRKYLEKRLGIHFSYNDKTINYKDSTSVAGCPITARFRKMLGEEWESFRVEGQKERQAHSKNNISFHRVSYSIEDIWHFCYDAEEPEAVLAFAQETLRLERKKAEELVRIWSAMPQGYAMLSQKAIRNINKILMLGLKYSDAVILAKVPELVDVSDEELLSIAKDYYLVEAQVNYDKRINSIVNGLIAKYKSVSEEYRFADHNYEYLLDESDEKDIIRQIENSLGARRWSLMDANEQTDILQKVRDRYQDFFRSHERKFVESPKLGESFENYLTKKFPMVEREQWKKLYHPSQITIYRPVSVGKDRSVLRLGNPDIGAIKNPTVLRVLNTLRRRVNQLLDDGVISPDETRVVVETARELNDANRKWALDTYNRIRHDENEKIKKILEEFYPKRDGISTDDIDKARYVIDQREVDYFTGSKTYNKDIKKYKFWLEQGGQCMYTGRTINLSNLFDPNAFDIEHTIPESLSFDSSDMNLTLCDAHYNRFIKKNHIPTDMPNYDKAITIDGKEYPAITSQLQRWVERVERLNRNVEYWKGQARRAQNKDRKDQCMREMHLWKMELEYWKKKLERFTVTEVTDGFKNSQLVDTRVITRHAVLYLKSIFPHVDVQRGDVTAKFRKILGIQSVDEKKDRSLHSHHAIDATTLTIIPVSAKRDRMLELFAKIEEINKMLSFSGSEDRTGLIQELEGLKNKLQMEVKVCRIGHNVSEIGTFINDNIIVNHHIKNQALTPVRRRLRKKGYIVGGVDNPRWQTGDALRGEIHKASYYGAITQFAKDDEGKVLMKEGRPQVNPTIKFVIRRELKYKKSAADSGFASWDDLGKAIVDKELFALMKGQFPAETSFKDACEQGIYMIKKGKNGMPDIKLHHIRHVRCEAPQSGLKIKEQTYKSEKEYKRYFYAAVGDLYAMCCYTNGKIREFRIYSLYDVSCHRKSDIEDIPEFITDKKGNRLMLDYKLRTGDMILLYKDNPAELYDLDNVNLSRRLYKINRFESQSNLVLMTHHLSTSKERGRSLGKTVDYQNLPESIRSSVKSLNFLIMGENRDFVIKNGKIIFNHR

SEQ ID NO: 622 - protein, 241 aa, Prevotella sp.
QAVKEKIKEAIAGKNFKTAIAEPIFMNKEKGIRINKVRYYVKAQERLKIRQQRDLSSKEYKQFFCVENESNYLLAIYEGELKGKKERDFCVVNNLDSAACLKRSNKGKAAPLVPERSEERNLPLLAVLKRGTQVLFYENSPEEILFDNPQDLVRRLYKVTGINTKKDVKNGKTYLYGNIELRFHQNAQKKDDVKMQSGVYKNNEVLRQGIVLSHKQFKALVEGVDFEFNVLGEIKKKERHA

SEQ ID NO: 623 - protein, 1216 aa, Prevotella stercorea
MTKILGIDTGTNSLGWAIVDKTADNYNLLDKGVNIFQEGVKIEKGIESSKAAERTEHRATRVRYYRIKLRKIRLLRILSDNHLCPPLSQEELSTWRLKKVYPKNELFMQWQRTDDDTEKTPYAYRHKCIHEKLDLSDVTDRYILGRAFYHIIQRRGFLSNRKEQGGEDSGKVKEGISTLTHEMNEAGYEYLGDYFYALYNKGEKIRKHYTARNEHFLSEFKAICEKQDLEKELGSEVVRNIEKAIFDQRPLKSQKGQVGKCVFEKNKTKCPSSHPMYEEFRMLTFINNIKIKTPNDDVLRPLNTGEREKIMPLFFRKSKKQFDFEDITKKLAPKKMYGFYKKEEDAEMPFLFNYPMDTSVSGCPVTAALKDVFGDDWITAICETYTLGEGKSRFDIVNDIWHALYFYSDKDKLAEFAINRLQLSEDEAKIFSEISLPADYASLSLKAICKILPYLRRGLIYSHAVFLGNLCEVMPKYEWSIKEMRETIIDNIIMEMDKCDTKDKRTFEVCIKDYLKGQYNVSDNSLKKLYHPSMIETYPRVQYTNEHGVYQLGSPRIDSVRNPMAMRSMFRLRKLVNRLLVEGKIDQNTEVHIEFARELNDANKRNAIALFVKENQSANDEARKQIITLFKKETGTDIEPTDKDILKYVLWEEQNHICLYTGKQIRISDFIGANPKFDIEHTIPRSVGGDSTKMNLTLCDSRFNREVKKTKLPVELPNHDEIMERIKEWKKNYELLDIQIRKNKKLSKGATTKEQKDTIIRKRHLLELRRDYWRGKYERFTMESVPEGFSRRQGTDISVISKYARLYLKSLFNRVYTVKGIATSDFRKIWGIQDIYSKKERINHVHHCIDAIVIACIGLDEYNKLGAYYHDEENNKWYGMSKASFKKPWATFVEDIKKIQDEILVYHYTPDNMPKQGRRRIKIDGKKILCKGDAARGSLHNDTYYGAIENDGAVKYVKRIDLASLEEKDVKNIVDDTVRSIIEAAIKEKGFKDAMASTIWMNEEKRVPIKKVRCFTPSITKPLNIRKQRDVSIKEYKQQYHVANDSNYLLALYIGTDNKGKEKREFEIVNILQAAQYYRTSNDKEVVDRHIVPIKSEHDYPFAYTLKIGTMVLLYEKSPNEVWDATIKERNRRLYKVTGLSTMRMKGRNGEYAYATVKLIHNEEARPSKDIKAKNGEYEQGEEFRPAIIMLHTQLNALVQGYDFEINELGEIRRLR

SEQ ID NO: 624 - protein, 1487 aa, Prevotella timonensis; identical to SEQ ID NO: 135

SEQ ID NO: 625 - protein, 770 aa, Pseudoramibacter alactolyticus
MAKGYFASDEEIDFSGVDDGFKNTLSSHQKFKEIFDVEVLNDWQKSMSEKIIFWATVYGDSKKFLKERLEDAYGNELDQKQIKRILGLRFKDWGRLSEAFLNLEGKNSKTNQSQTIIEALWNGDGTNNFNLMELLSSQFTYRDTLKKRALKGEKTLTNITYEDLSDLYLSPSVRRMVWQTILIVKELRQVLGAGPAKIFIEMARDVTLKAGTRTTSRRQQLLDLYKNVQTESRNWVEEIETQEESRFRSKKIFLYYTQMGQCMYTGEPIVFKDLFNRNLYDIDHIYPRHFVKDDSLINNLVLVKKQANSHKSDTFPIENSIQQARRDFWKWLSEKGLISREKFNRLTRRTSFSDEELAGFISRQIVETRQGTKAVAQIFENALPDSEVVYVKAGNVSDFRHHFNLLKCREINDLHHAQDAYLNVVVGNVYHTKFTKNPINFIKGYRKDRKAYAYHMDQIFDHPVKRNDIIAWQTDKNQSIATVKKVMAKGTPLVTRMSYEEHGELSNQNICSAKAAQKAEGKGYLPIKNSERLSNTQRYGGYNKYAGSYFFLVEHTLKKNRVRTIETMPLFLRDTIKTSKDLLKYCCESLKLEAPSIRVMKIKMGSLLSVNGAFVYLTGRSGKKLITPNGFQLILPQKWQDYIRLLIKTKDSPDDVEGISGGKNIEFYDILVEKHTKTCLKNRPNPIGEKLREWRNDFIALDNQKQSDILLEILKLTTFDNSGADLRAIGGKNQSGVSTIGKKISSQKSVVLVHRSVTGIFEKQVDLLSI

SEQ ID NO: 626 - protein, 103 aa, Rhizobium etli
MSGEQLTREIGRSGVKASAVGLGTWAIGGWMWGGTDEAQSIAAIQASLDAGVTLIDTAPAYGLGRSEEIVGKALAGRRDKAVIATKCGLVWHTQKGNHFFDQD

SEQ ID NO: 627 - protein, 1059 aa, Rhodovulum sp.
MGIRFAFDLGTNSIGWAVWRTGPGVFGEDTAASLDGSGVLIFKDGRNPKDGQSLATMRRVPRQSRKRRDRFVLRRRDLLAALRKAGLFPVDVEEGRRLAATDPYHLRAKALDESLTPHEMGRVIFHLNQRRGFRSNRKADRQDREKGKIAEGSKRLAETLAATNCRTLGEFLWSRHRGTPRTRSPTRIRMEGEGAKALYAFYPTREMVRAEFERLWTAQSRFAPDLLTPERHEEIAGILFRQRDLAPPKIGCCTFEPSERRLPRALPSVEARGIYERLAHLRITTGPVSDRGLTRPERDVLASALLAGKSLTFKAVRKTLKILPHALVNFEEAGEKGLDGALTAKLLSKPDHYGAAWHGLSFAEKDTFVGKLLDEADEERLIRRLVTENRLSEDAARRCASIPLADGYGRLGRTANTEILAALVEETDETGTVVTYAEAVRRAGERTGRNWHHSDERDGVILDRLPYYGEILQRHVVPGSGEPEEKNEAARWGRLANPTVHIGLNQLRKVVNRLIAAHGRPDQIVVELARELKLNREQKERLDRENRKNREENERRTAILAEHGQRDTAENKIRLRLFEEQARANAGIALCPYTGRAIGIAELFTSEVEIDHILPVSLTLDDSLANRVLCRREANREKRRQTPFQAFGATPAWNDIVARAAKLPPNKRWRFDPAALERFEREGGFLGRQLNETKYLSRLAKIYLGKICDPDRVYVTPGTLTGLLRARWGLNSILSDSNFKNRSDHRHHAVDAVVIGVLTRGMIQRIAHDAARAEDQDLDRVFRDVPVPFEDFRDHVRERVSTITVAVKPEHGKGGALHEDTSYGLVPDTDPNAALGNLVVRKPIRSLTAGEVDRVRDRALRARLGALAAPFRDESGRVRDAKGLAQALEAFGAENGIRRVRILKPDASVVTIADRRTGVPYRAVAPGENHHVDIVQMRDGSWRGFAASVFEVNRPGWRPEWEVKKLGGKLVMRLHKGDMVELSDKDGQRRVKVVQQIEISANRVRLSPHNDGGKLQDRHADADDPFRWDLATIPLLKDRGCVAVRVDPIGVVTLRRSNV

SEQ ID NO: 628 - protein, 1405 aa, Riemerella anatipestifer
MKTILGLDLGTNSIGWALVKEAENSNEKSEIIKLGVRVNPLTVDEKTNFEAGRPLSTNADRTAKRSARRNLQRYKLRRKNLIDLLIKNQLIDKDTPLTEIGKNTTHQTLELRAKAARERIELEDLARVFLAINKKRGYRSSRKVNNEEEGQAVDGMAVAKKLYDENLTPGQYAYELLSKGKKYVPDFYRSDLQAEFNAIWEYQKQFYADILDDELYNALKGQGQQNSRKRFLAIKGVYTAENKGKRDDVKLRHYKWRSEAISKKINIEEVAYVLVEINNDLNKSSGYLGAISDRSKELYFNKETVGENLWKQIQKNPHTSLKNQVFYRQDYLDEFEQIWETQAQFHPQLTLALKEQIRDVIIFYQRKLKSQKGLLSFCQFESWEIERKDENGNVILNKTTQLPKRQTVGRRVAPKSSPLFQEFKIWQNINNLEVTKISEGASKNKKETETLSDDERKLLFEELNLRGNLSQKEVLQILGLKDKEYKTNFSEGLEGNRTNAALFNIYQQIAENEGYGFDWSKKSAQEIKEELKAVFPQIGIQADILDFNANLDGKEFENQASYQLWHLLYSAEEDDKINEEDQIIYGNSAVSLKKKLCEKFGFTPEYAKWIANVSLQDDYGNLSTKAMRKIIPYLIDGNDYSEACALAGYNHSNSLTKEENDNRELLDKLELLPKNSLRNPVVEKILNQMVNVVNQVIETYGKPDEVRIELARELKKSAEKRAEMTKSINEATRRNEDIKKLITKDFGIPNPTKSDVVRYRLWEELAPLAYKDVFTGKQIKKEDLFSSKIDIEHIIPKALLFDDSFSNKTLVFRETNLKKADRTAYDFIESDYNATLDDYIQRVETLYNNTKGTISKGKRNKLLMAQKNLPDGFIERDLRNSQYIAKKAKAMLYQVFKDVNVTSGSITDRLREDWDLINVMKELNFPKYKALGLTEIEERYDIGQEKTKRVEVITDWTKRNDHRHHAMNALTVAFTTSSHIQYLNYLNARKNESHKEHKNIKGIENKITHKQKDKRKFIPPMPNFREEAKKHIETILVSIKNKNKVYTKNINKTKKKSGHNTKEQLTPRGQLHKETVYGKSKRPMSKPTKINKNFSLEQAQLIINVQEKELVLRHLAQFDNNPAVAFDTKTLKKMPLLKNGEPLKEVLCFEEIFTIRKDITPDLKIEKVVDEKIKAILEQRKKDFGGNAKEAFSDLDKNPIWLNKKKGICIKRVTITGVSNAEALHHQKDHLGREILDDNGNPIPADFVSTGNNHHLAVYLDSEGKLQDNIVSFYEAVVRTSQGLPVVDKGLNKDLGWKFLFSLKQNEMFVFPNDDFDINDFDLLDDKKAELISKHLYRVQKISKVSAGNSFVRDIVFRHHLETTVKEVKELKDISYIQLKSLEGLRNIKKVRINHIGKIVQVGEY

SEQ ID NO: 629 - protein, 1145 aa, Riemerella anatipestifer
MKTILGLDLGTNSIGWALVKETENSNEKSEIIKLGVRVNPLTVDEKTNFEAGRPLSTNADRTAKRSARRNLQRYKLRRKNLIDLLIKHRLIDKDTPLTEIGKNTTHQTLELRAKAARERIELEDLARVFLAINKKRGYRSSRKVNNEEEGQVVDGMAVAKKLYDENLTPGQYAYELLSKGKKYVPDFYRSDLQAEFDSIWEYQKQFYADILDDELYNALKGQGQQNSRKRFLAIKGVYTAENKGKRDEVKLQHYKWRSEAITQKLSIEEVAYVLVEINNDLNKSSGYLGAISDRSKELYFNKETVGENLWKQIQKNPHTSLKNQVFYRQDYLDEFEQIWETQAQFHPQLTLALKEQIRDVVIFYQRKLKSQKGLLSFCQFESWEIERKDENGNVILNKTTQLPKRQTVGRRVAPKSSPLFQEFKIWQNINNLEIAKISDGNSKNKKETEALSDDERKLLFEELNLRGNLSQKEVLQILGLKDKEYKTNFPEGLEGNRTNAALFNIYQQIAENEGYGDWTKKSAQEIKEELKAVFPQIGIQADILDFNAELDGKEFENQASYQLWHLLYSAEEDDKINEEDQIIYGNSAVSLKKKLCEKFGFTPEYAKWIANVSLQDDYGNLSTKAMRKIIPYLIDGNDYSEACALAGYNHSNSLTKEENDNRERLNKLELLPKNSLRNPVVEKILNQMVNVVNQVIETYGKPDEVRIELARELKKSAEERAEMTKGINEATRRNEDIKKLITKNFGIPNPTKNDVVRYRLWEELAPLAYKDVFTGRQIKKEDLFSSKIDIEHIIPKALLFDDSFSNKTLAFRETNLKKADRTAYGFIESDYNATLDDYIQRVETLYNNAKGTISKGKRNKLLMAQKNLPDGFIERDLRNSQYIAKKAKSMIEKVFNDVNVTSGSITDRLREDWDLINVMKELNFPKYKALGLTEIEERYDIGQEKTKKVEVITDWTKRNDHRHHAMDALTVAFTTKSHVQYLNNLNTIHSLKGDEVDLELSKLYGLKNTITEVVNKKRKFIPPMPNFREEAKKHIETILVSIKNKNKVYTKNINKTKKESGYHTKEQLTPRGQLHKETVYGKSKRPMNKPTKINKNFSLEQAQLIINVQEKELVLRHLAQFDNNPAVAFDTKTLKKCHYLKMVNL

SEQ ID NO: 630 - protein, 1400 aa, Riemerella anatipestifer
MKTILGLDLGTNSIGWALVKETENSNEKSEIIKLGVRVNPLTVDEKTNFEAGRPLSTNADRTAKRSARRNLQRYKLRRKNLIDLLIKHRLIDKDTPLTEIGKNTTHQTLELRAKAARERIELEDLARVFLAINKKRGYRSSRKVNNEEEGQVVDGMAVAKKLYDENLTPGQYAYELLSKGKKYVPDFYRSDLQAEFDSIWEYQKQFYADILDDELYNALKGQGQQNSRKRFLAIKGVYTAENKGKRDEVKLQHYKWRSEAITQKLSIEEVAYVLVEINNDLNKSSGYLGAISDRSKELYFNKETVGENLWKQIQKNPHTSLKNQVFYRQDYLDEFEQIWETQAQFHPQLTLALKEQIRDVVIFYQRKLKSQKGLLSFCQFESWEIERKDENGNVILNKTTQLPKRQTVGRRVAPKSSPLFQEFKIWQNINNLEIAKISDGNSKNKKETEALSDDERKLLFEELNLRGNLSQKEVLQILGLKDKEYKTNFPEGLEGNRTNAALFNIYQQIAENEGYGDWTKKSAQEIKEELKAVFPQIGIQADILDFNAELDGKEFENQASYQLWHLLYSAEEDDKINEEDQIIYGNSAVSLKKKLCEKFGFTPEYAKWIANVSLQDDYGNLSTKAMRKIIPYLIDGNDYSEACALAGYNHSNSLTKEENDNRERLNKLELLPKNSLRNPVVEKILNQMVNVVNQVIETYGKPDEVRIELARELKKSAEERAEMTKGINEATRRNEDIKKLITKNFGIPNPTKNDVVRYRLWEELAPLAYKDVFTGRQIKKEDLFSSKIDIEHIIPKALLFDDSFSNKTLAFRETNLKKADRTAYGFIESDYNATLDDYIQRVETLYNNAKGTISKGKRNKLLMAQKNLPDGFIERDLRNSQYIAKKAKSMIEKVFNDVNVTSGSITDRLREDWDLINVMKELNFPKYKALGLTEIEERYDIGQEKTKKVEVITDWTKRNDHRHHAMDALTVAFTTKSHVQYLNNLNTIHSLKGDEVDLELSKLYGLKNTITEVVNKKRKFIPPMPNFREEAKKHIETILVSIKNKNKVYTKNINKTKKESGYHTKEQLTPRGQLHKETVYGKSKRPMNKPTKINKNFSLEQAQLIINVQEKELVLRHLAQFDNNPAVAFDTKTLKKMPLLKNGEPLKEVLCFEEIFTIRKDITPDLKIEKVVDEKIKAILEQRKKDFGGNAKEAFSDLDKNPIWLNKEKGICIKRVTITGVSNAEALHHQKDHLGREILDDNGNPIPADFVSTGNNHHVAIYEDEKGKLQEKVVSLYEAVARANQGLPVVDKGLNEDLGWKFLFTMKQNEMFVFPNDDFDVNDIDLLDENNAKIISQHLFRVQKLATKNYMFRHHLETNVQEVKELNDIAYKSIRSTEPLKNIKKVRINHIGKIVQVGEY

SEQ ID NO: 631 - protein, 1128 aa, Roseburia intestinalis
MDEKMDYRIGLDIGIASVGWAVLQNNSDDEPVRIVDLGVRIFDTAEIPKTGESLAGPRRAARTTRRRLRRRKHRLDRIKWLFENQGLINIDDFLKRYNMAGLPDVYQLRYEALDRKLTDEELAQVLLHIAKHRGFRSTRKAETAAKENGAVLKATDENQKRMQEKGYRTVGEMIYLDEAFRIGCSWSEKGYILTPRNKAENYQHTMLRAMLVEEVKEIFSSQRRLGNKKATEELEEKYLEIMTSQRSFDLGPGMQPDGKPSPYAMEGFSDRVGKCTFLGDQGELRGAKGTYTAEYFVALQKINHTKLVNQDGETRNFTEEERRALTLLLFTQKEVKYAAVRKKLGLPEDILFYNLNYKKAATKEEQQKENQNTEKAKFIGMPYYHDYKKCLEERVKYLTENEVRDLFDEIGMILTCYKNDDSRTERLAKLGLVPIEMEGLLAYTPTKFQHLSMKAMRNIIPFLEKGMTYDKACEEAGYDFKADSKGTKQKLLTGENVNQTINEITNPVVKRSVSQTVKVINAIIRTYGSPQAINIELAREMSKTFEERRKIKGDMEKRQKNNEDVKKQIQELGKLSPTGQDILKYRLWQEQQGICMYSGKTIPLEELFKPGYDIDHILPYSITFDDSFRNKVLVTSQENRQKGNRTPYEYMGNDEQRWNEFETRVKTTIRDYKKQQKLLKKHFSEEERSEFKERNLTDTKYITTVIYNMIRQNLEMAPLNRPEKKKQVRAVNGAITAYLRKRWGLPQKNRETDTHHAMDAVVIACCTDGMIQKISRYTKVRERCYSKGTEFVDAETGEIFRPEDYSRAEWDEIFGVHIPKPWETFRAELDVRMGDDPKGFLDTHSDVALELDYPEYIYENLRPIFVSRMPNHKVTGAAHADTIRSPRHFKDEGIVLTKTALTDLKLDKDGEIDGYYNPQSDLLLYEALKKQLLLYGNDAKKAFAQDFHKPKADGTEGPVVRKVKIQKKQTMGVFVDSGNGIAENGGMVRIDVFRVNGKYYFVPVYTADVVKKVLPNRASTANKPYSEWRTMEDKDFLFSLYSRDLVHIKSKKGIPIKNVDGSLGESKEVYAYYIGADISGAKIEGKAHDSRYTFRGIGVQKLELIEKCQVDILGHISTVKNEKRMGFS

SEQ ID NO: 632 - protein, 1471 aa, Scardovia wiggsiae
MGYKAPRNDKGEIDYGVGLDLGNGSVGWVAMDKDYHLIRARGHELIGARLFDPANSAENRRESRTTRRRLSRRRWRLRMLDSLFASELAKIDPNFLARRKYSWVHPKDEQNHENWYGSIIFGSKEQDKQFYKDYPTIYHLRKKLTEDTERHDIREIYVAIHHIVKYRGHFLREGEINSENLFDPEGFVELIKDVIKLNNSYDESTPIFEASPADVSEALLNEHTSRSGRIEDTLDKLDFSVSRVDKHELKGMRDAAKAVIGAIVGNTADFSKIFNLDNLDKDSKDNLKLKFADSNFDEKYGGVVGSGLLDETQIELVDRIHAVYDAVALKGILGDAHTISEAKVESYEKHRKNWKLIKEELRTKENKDEVDLWYGDLSGRQYKNPPDPEKGPDEGSKKDSPIRDSDQKQNLIKKANDYFTELIDDSQLSEEQKNCLKNDINNGQLFPVQRSSDNGVIPYQIHLNELRRIIENQKQYYPFLAETFIRKTAEGKSYEENKIVALLKFRVPYYVGPLVSKEDMEEHSSGNSAYHWMARNPGRGEAITPWNFDEVVDKDESGARFISRLTGTDTYLLGEPTLPQHSLLYEEYMVLSELNNVRLNVRQGNHWSDKNRQRLSYKQKEFLIENLFKEHKTVTRKRAEDCLSSMGCGEVQLFGLSDEKKFASSLSSYITLKKILGKAFVDDSGNSAILERIIEVQTVFEDREPLTHQLSLIDSLTVEQRKQLAKIHYTGWGKLSRKLLTSKKGSYKIHSQNEIMRTQHSIIDIMRGDSLNLIEIIRDKKIGIGEWIDNENLDRETGESDVSRLESVFEGIVMSPRVKRGVVQAVRVIDDLAKAIGNPPQRIFIEMADEVQASQRTVSRLSRLKALYGSPSLQKEFNDLKDLRKSLNETKDADLQEDRLYLYYIQLGKDLYTGKEISIDSLSSAYDIDHIVPQALTQDDSIDNRVLVSRKENARKTDSYLYTPDLIKNMRPLWGKLLAAGLMSQKKYDALTRVDDFKDREKQRFVQRSLVETRQIMKNVSTILRTYYGEDTNVVTLKSSITHDMRKYLGFPYKNRDINDYHHAQDALCISAAGQFMLNRHFVSGGEVTDGASNAYNMYLAEYLQEFRDAKARGERKRSTAFGFVVGSMSSKDDEKRTDHRTGEIVWSETNAEYLRKVMNYKKMLITQKVGDVKTRALYDETRYGHKESSAKSIKFDNLRRDTSLYGGFSGASTAYMMLVEYKKKNKLVSITAQEASLLAVADQKNDTVSVMDGILASHGLSGAKILLPKIVTGQLLDYSDALVTLQSASELNTARQMWLPRNDYNDIDIILKSKDIEDAAHKLGYDSDTVHVLRRIQKLFEAVFRVAESQFPLHQLSKDQQEEILRDPQNYGFGSAVKLLGGLLKALHANAENTNLAGLVKVLHGDKEYSDDGKAKEFKKFGFSPRWRRISNPTGFTLSDSDTFIYQSPSGIFEQRVTVKELKEKADKQK

SEQ ID NO: 633 - protein, 116 aa, Sphingobacterium spiritivorum
MFRKYFEEKNSARLLFTLKQGDFVYVPDDNEEVILDESSPLFIDYWKNISERSNNIHVVQKFSGKEIYFLKHTIADTIAKKIEFGSQDCYQSLNGKSIKEFCIKIDSDRLGNISKV

SEQ ID NO: 634 - protein, 1306 aa, Sphingobacterium spiritivorum; identical to SEQ ID NO: 98

SEQ ID NO: 635 - protein, 1110 aa, Sphingobium sp.
MAEGKKRIWRLGADLGANSLGWAAIELSAPVNGKPIAILAAGSRIFSDGRDPKSGASLAVDRRDARAMRRRRDRFKQRQKALIKYLIADGLFPADEAARNAMAAIDPYAVRARALDEALSLPELGRALFHLNQRRGFKSNRKADRKADDDAGKIAIGIDRTRDAIAEDEADAGAEPGSWTFGKWLHERRLKGQSVRTRLRPESGEDAKGDGYDFYPDRALMEEEFDAIWAAQAPHHPDVLTNDVHDRLHEIIFYQRPLKAPQVGMCSLIPGDRRLPKAHPLFQRRRLLEELNALMIVRPGEVAQRLTREERDILLLKLKDKNKVSFATLRKALKLDPDARFNKESEDRTDLKGDEVAAVMGSKTRFGNLWVHLSIEAQWDVLARLDAVESDAEDAAFCAWLVETYALTPEQARAVANAPLPPGYGRFGETATRKLIEALRDGKKDDRVLVYSEAVTEAGLGHHSDRRTGEVFEDAKGRPQLPYYGVALERHIMPGTGDPSDPEEMRVGRLTNPTVHIGLNQLRRILNVLIRAYGPPAEIAIELARELKLTDEDKKRINRENNDNRIAAERRSEKLLAIGQADSGANRALLKLWEELNPANVLDRRCIYSGRQISIDMLFSAAVEVDHILPFAATLDDSNGNKIVCLREANREKRKRSPHDAWGHSARWDEIAARAAQLPRNKRWRFEPDAMDKFRDEGGFQARHLVDTQYLARLSREYLATLYPEKGEGSGHIWVSPGRLTEMVRRKLGLNDLLPDHNFGGGADQAKNRLDHRHHAIDAVVVAIVDRGMLNAIARASGQEGAEGRERIIIPEPWDGFRDALRETVNRITVSHRTDHGTASKAGLPKGKDATAGRLHNDTAYGFTGDTDAKGNSIVVRRVPLSSFKKLADLDRIRDADLKAALYQHLNGLEGKAFEKALAEFHKLEWHNFGGVRRVRVTEPLTVIPIKDRNGRIYKGYKGDSNYRYDVWELPDGKWVTNWKNEAGEAMSSVISMFDAHQSSEPPRPHPAARKILSLHQNDLLAIEREGEDRKLMRVVKFGQSGQITLAEHQQAGDLKKRDAVSNDDDPFKYFAPTSGGLKKVKARQVRIDEIGRVLDPGFPARTARRKTRG

SEQ ID NO: 636 - protein, 1084 aa, Sporolactobacillus vineae
MKYSIGLDIGISSVGWSVINLDRERIELMGARLFDAAENPKNGSSLAAPRRDARSARRRLRRRRYRVGRVRHFIIDRGLVTRGQADQLFDWKDGDLDIWLVRVNALERLLTDREFARVLIHIAKNRGYRSNRKSEAKSGENGQVLSAIKANKELMEEKGYQTVAEMLVNEPETFAGRKRNRGGEYTHVIARSELEHEIRLIFTKQRAFGNRFATEENENTYVKIWAAQRPVATKDDILKKIGDCTFEKGEKRAPKASYAFQYFRALDKLNRLRILSVREPSRNLTDDERNLIVPALFNHDKQKYSDLRKILQLRDDQKFNELFYDPGKSLKENENKTFLSLAEQYKIRKVIRDVQGKDGLLQYRPLDIDTIAYALTVFKDDQDTRDYLSNTFVNGNGKQVLNLANRAFDAELIDGLLSLSFAKFGHLSLKALHKLIPHMEQGLSYYDACKKVGYHDNEQVGKSKQHLLPVIPADEIRNPVVVRSLSQTRKVINAIIKRYGSPTFMYIELAREMGRPYNERRDLEKQYNKNRTVNDSAIEQIHELYPEIGAPRGHDILKYKLWQQQDCKCAYSLEKIPAEKIFEPGYAEVDHIIPYSRSFDDSNSNKVLVLSRMNQEKKNRTPYEWFGGDEHRWNKFESYVNALKVNRKKKSLLTKKNMDTEEEDTFKSRHLNDTRYITRFIKSFVEDNLLFREIEGAKQHVFTVNGAYTSLMRKRWGFNKNREESDLHHSVDAVIIAVSQPFRNEVSRYFKHREISLPQLLKRTWDYFPEPWEGFVKELRARTLQDPEKLKLALESLDLDSYDPEFIDEVKPIFISRMPKRSIKGQIHDETLRRNRGKTKDGFVKIVTRTRLENIKFDKNGDFPMYGRESDPKTYQAIKQRYLENNKDKKKAFIEPLYKPAKNPNNASLIRSVKIEDKANQIVPLRDEAVAYNASIVRTEVYRNKETGKFYLAPVYVSDVFAGREPRRFIRANVPYEQWVNITDKFTFLFNLYPNDVIYIKMKKVKTTKSNINKTISWQESYFYFKGTDIHTGAITIIDHMNSFTDRVGTQGLQLFEKYQVDPLGNLSRVHGETQYGVPALSHS

SEQ ID NO: 637 - protein, 475 aa, Staphylococcus massiliensis
MGQDYILGLDIGITSVGYGLIDYHDKSVIDAGVRLFKEANVENNEGRRSKRGSRRLQRRRKHRLARTRNLLESYQLNPFPKCEKNPYEIRVKGFKEVLTSDELSAALLHLAKRRGIDNVHVTDTESDSSDNGLSTKEQLAKNQKALESRYVCELQLERLLNDNKVRGANNRFKTQDFVREAKQILSIQKDHHNLDQVFIDKYISLLETRREYYEGPGKGSPYGWDGDIKKWYELLMGRCTYFPESLRSVKYAYSADLFNALNDLNNLVIVRDENDKLTYPEKYHIVENVFKQRKKPTLKQIAKEIDVAPEDIRGYRVTASGTPVFTSFKLYHDIKSVTSNDKVLEDTELLDAIAEVLTIYQSPIEVQEKLESLNVILTKEEIEGISKLTGYTGTHALSLKAIQIVIDELWETNDNQMTIFTRLNMKPQKVDLAKANKIPTSLVEDFIISPVAKRAFIQSIKVINAVIKNMVCLKI

SEQ ID NO: 638 - protein, 581 aa, Staphylococcus massiliensis
MPKDIIIELAREKNSDEERKIIRDVQKRNQQTRDLVDKVIKETGKTKAKGMVEKLILHDKQEGKCLYSLKSIPLEDLLNNPHHYEVDHIIPRSVSYDNSMNNKVLVLQEENSKKSNQTPFQYFNSSNTHITFKQFKQHVLNLSKTKDRITKKKKEYLLEERDINKFSVQKEFINRNLVDTRYATRELMTLLRAYFSANELDVKVKAINGGFTSYLRKRWDFKKDRNAGYKHHAEDALIIANVDFIFKQLKALDNAKKVMEGRKVQVEKDNVEDNEHYESLFREPDQIKEIKLYDNYKFSHRVDKKPNRELINDTIYSTRKVDNKTYTIQTVNNIYDKQNDQLKKLFNKSPEKFLMYKHDPKTFDKLATIMRQYKNEKNPLYKFHDETGEYLTKYAKKDNGPIVKSLKYIGKQVNAHLDITNDYENSNNKVVKLSLKPFRFDVYLDDGKYKFVTVKYLDIIKKDTYYVIDEEKYKLALQQKKISENAKFIGSFYNNDLIKINGELLRVIGVNDDAKNTLELNMIDISYRDYVENMNLATTPRIRKNIGKSITILEKYTTDILGNTFKISSPEKPQFIFKVRD

SEQ ID NO: 639 - protein, 1334 aa, Staphylococcus pseudintermedius; identical to SEQ ID NO: 205

SEQ ID NO: 640 - protein, 1112 aa, Staphylococcus simulans; identical to SEQ ID NO: 252

SEQ ID NO: 641 - protein, 773 aa, Streptococcus agalactiae
MNKPYSIGLDIGTNSVGWSIITDDYKVPAKKMRVLGNTDKEYIKKNLIGALLFDGGNTAADRRLKRTARRRYTRRRNRILYLQEIFAEEMSKVDDSFFHRLEDSFLVEEDKRGSKYPIFATLQEEKDYHEKFSTIYHLRKELADKKEKADLRLIYIALAHIIKFRGHFLIEDDSFDVRNTDISKQYQDFLEIFNTTFENNDLLSQNVDVEAILTDKISKSAKKDRILAQYPNQKSTGIFAEFLKLIVGNQADFKKYFNLEDKTPLQFAKDSYDEDLENLLGQIGDEFADLFSAAKKLYDSVLLSGILTVIDLSTKAPLSASMIQRYDEHREDLKQLKQFVKASLPEKYQEIFADSSKDGYAGYIEGKTNQEAFYKYLSKLLTKQEDSENFLEKIKNEDFLRKQRTFDNGSIPHQVHLTELKAIIRRQSEYYPFLKENQDRIEKILTFRIPYYIGPLAREKSDFAWMTRKTDDSIRPWNFEDLVDKEKSAEAFIHRMTNNDFYLPEEKVLPKHSLIYEKFTVYNELTKVRYKNEQGETYFFDSNIKQEIFDGVFKEHRKVSKKKLLDFLAKEYEEFRIVDVIGLDKENKAFNASLGTYHDLEKILDKDFLDNPDNESILEDIVQTLTLFEDREMIKKRLENYKDLFTESQLKKLYRRHYTGWGRLSAKLINGIRDKESQKTILDYLIDDGRSNRNFMQLINDDGLSFKSIISKAQAGSHSDNLKEVVGELAGSPAIKKGILQSLKIVDELVKVMGYEPEQIVVEMARENQTTNQ

SEQ ID NO: 642 - protein, 1370 aa, Streptococcus agalactiae
MNKPYSIGLDIGTNSVGWSIITDDYKVPAKKMRVLGNTDKEYIKKNLIGALLFDGGNTAADRRLKRTARRRYTRRRNRILYLQEIFAEEMSKVDDSFFHRLEDSFLVEEDKRGSKYPIFATMQEEKDYHEKFPTIYHLRKELADKKEKADLRLVYLALAHIIKFRGHFLIEDDRFDVRNTDIQKQYQAFLEIFDTSFENNHLLSQNVDVEAILTDKISKSAKKDRILAQYPNQKSTGIFAEFLKLIVGNQADFKKHFNLEDKTPLQFAKDSYDEDLENLLGQIGDEFADLFSAAKKLYDSVLLSGILTVTDLSTKAPLSASMIQRYDEHREDLKQLKQFVKASLPEKYQEIFADSSKDGYAGYIEGKTNQEAFYKYLSKLLTKQEDSEYFLEKIKNEDFLRKQRTFDNGSIPHQVHLTELKAIIRRQSEYYPFLKENQDKIEKILTFRIPYYVGPLARGNSDFAWMTRKTDDSIRPWNFEDLVDKEKSAEAFIHRMTNNDLYLPEEKVLPKHSLIYEKFTVYNELTKVRYKNEQGETYFFDSNVKQEIFDGVFKEHRKVSKKQLLDFLAKEFEEFRIVDVTGLDKENKAFNASLGTYHDLKKILDKDFLDNPDNESILEDIVQTITLFEDREMIKKRLENYKDLFTESQLKKLYRRHYTGWGRLSAKLINGIRDRESQKTILDYLISDGRANRNFMQLINDDGLSFKSIISKAQSGSHSDNLKEVVGELAGSPAIKKGILQSLKIVDELVKVMGYEPEQIVVEMARENQTTNQGRRNSRQRYKLLEDGVKNLASDLNGDILKEYPTDNQALQNERLFLYYLQNGRDMYTGEALDIDNLSQYDIDHIVPQAFIKDDSIDNRVLVSSAKNRGKSDDVPSIDIVKARKAFWKKLLDAKLISQRKYDNLTKAERGGLTPDDKAGFIQRQLVETRQITKHVARILDERFNNKVDDNNKPIRKVKIVTLKSNLVSNFRKEFGFYKIREVNNYHHAHDAYLNAVVAKAILTKYPQLEPEFVYGDYPKYNSYKTRKSATEKLFFYSNIMNFFKTKVTLADETVVVKDDIEVNNETGEIAWDKKKHFATVRKVLSYPQVNIVKKTEVQTGGFSKESILAHSNSDKLIPRKTKDIYLDPKKYGGFDSPIVAYSVLVLADIKKGKAQKLKTVKELIGITIMERERFEKNPSAFLESKGYLNIRTDKLIILPKYSLFELENGRRRLLASAGELQKGNELALPTQYMKFLYLASRYNESKGKPEEIEKKQEFVNQHVSYFDDILQLINDFSKRVILADANLEKINKLYSDNKDNTPVDELAKNIINLFTFTSLGAPAAFKFFDKSVDRKRYTSTKEVLDSTLIHQSITGLYETRIDLGKLGED

SEQ ID NO: 643 - protein, 1370 aa, Streptococcus agalactiae
MNKPYSIGLDIGTNSVGWSIITDDYKVPAKKMRVLGNTDKEYIKKNLIGALLFDGGNTAADRRLKRTARRRYTRRRNRILYLQEIFAEEMSKVDDSFFHRLEDSFLVEEDKRGSKYPIFATMQEEKDYHEKFPTIYHLRKELADKKEKADLRLVYLALAHIIKFRGHFLIEDDRFDVRNTDIQKQYQAFLEIFDTSFENNHLLSQNVDVEAILTDKISKSAKKDRILAQYPNQKSTGIFAEFLKLIVGNQADFKKHFNLEDKTPLQFAKDSYDEDLENLLGQIGDEFADLFSAAKKLYDSVLLSGILTVTDLSTKAPLSAYMIQRYDEHREDLKQLKQFVKASLPEKYQEIFADSSKDGYAGYIEGKTNQEAFYKYLSKLLTKQEDSEYFLEKIKNEDFLRKQRTFDNGSIPHQVHLTELKAIIRRQSEYYPFLKENQDKIEKILTFRIPYYVGPLARGNSDFAWMTRKTDDSIRPWNFEDLVDKEKSAEAFIHRMTNNDLYLPEEKVLPKHSLIYEKFTVYNELTKVRYKNEQGETYFFDSNVKQEIFDGVFKEHRKVSKKQLLDFLAKEFEEFRIVDVTGLDKENKAFNASLGTYHDLKKILDKDFLDNPDNESILEDIVQTITLFEDREMIKKRLENYKDLFTESQLKKLYRRHYTGWGRLSAKLINGIRDRESQKTILDYLISDGRANRNFMQLINDDGLSFKSIISKAQSGSHSDNLKEVVGELAGSPAIKKGILQSLKIVDELVKVMGYEPEQIVVEMARENQTTNQGRRNSRQRYKLLEDGVKNLASDLNGDILKEYPTDNQALQNERLFLYYLQNGRDMYTGEALDIDNLSQYDIDHIVPQAFIKDDSIDNRVLVSSAKNRGKSDDVPSIDIVKARKAFWKKLLDAKLISQRKYDNLTKAERGGLTPDDKAGFIQRQLVETRQITKHVARILDERFNNKVDDNNKPIRKVKIVTLKSNLVSNFRKEFGFYKIREVNNYHHAHDAYLNAVVAKAILTKYPQLEPEFVYGDYPKYNSYKTRKSATEKLFFYSNIMNFFKTKVTLADETVVVKDDIEVNNETGEIAWDKKKHFATVRKVLSYPQVNIVKKTEVQTGGFSKESILAHSNSDKLIPRKTKDIYLDPKKYGGFDSPIVAYSVLVLADIKKGKAQKLKTVKELIGITIMERERFEKNPSAFLESKGYLNIRTDKLIILPKYSLFELENGRRRLLASAGELQKGNELALPTQYMKFLYLASRYNESKGKPEEIEKKQEFVNQHISYFDDILQLINDFSKRVILADANLEKINKLYSDNKDNTPVDELAKNIINLFTFTSLGAPAAFKFFDKSVDRKRYTSTKEVLDSTLIHQSITGLYETRIDLGKLGED

SEQ ID NO: 644 - protein, 1378 aa, Streptococcus agalactiae
MNKPYSIGLDIGTNSVGWSIITDDYKVPAKKMRVLGNTDKEYIKKNLIGALLFDGGNTAADRRLKRTARRRYTRRRNRILYLQEIFAEEMSKVDDSFFHRLEDSFLVEEDKRGSKYPIFATMQEEKYYHEKFPTIYHLRKELADKKEKADLRLIYLALAHIIKFRGHFLIEDDRFDVRNTDIQKQYQAFLEIFDTTFENNDLLSQNVDVEAILTDKISKSAKKDRILARYPNQKSTGIFAEFLKLIVGNQADFKKHFNLEDKTPLQFAKDSYDEDLENLLGQIGDEFADLFSAAKKLYDSVLLSGILTVIDLSTKAPLSASMIQRYDEHHEDLKHLKQFVKASLPENYREVFADSSKDGYAGYIEGKTSQEAFYKYLLKLLTKQEGSEYLLEKIKNEDFLRKQRTFDNGSIPHQVHLTELRAIIRRQSEYYPFLKENLDRIEKILTFRIPYYVGPLAREKSDFAWMTRKTDDSIRPWNFEDLVDKEKSAEAFIHRMTNNDLYLPEEKVLPKHSLIYEKFTVYNELTKVRFLAEGFKDFQFLNRKQKETIFNSLFKEKRKVTEKDIISFLNKVDGYEGIAIKGIEKQFNASLSTYHDLKKILGKDFLDNTDNELILEDIIQTLTLFEDREMIKKRLDIYKDFFTESQLKKLYRRHYTGWGRLSAKLINGIRNKENQKTILDYLIDDGSANRNFMQLIKDAGLSFKPIIDKARTGSHSDNLKEVVGELAGSPAIKKGILQSLKIVDELVKVMGYEPEQIVVEMARENQTTAKGLSRSRQRLTTLRESLGNLKSNILEEKKPKYVKDQVENHHLSDDRLFLYYLQNGKDMYTDDELDIDNLSQYDIDHIIPQAFIKDDSIDNRVLVSSAKNRGKSDDVPSIEIVKARKMFWKNLLDAKLMSQRKYDNLTKAERGGLTSDDKARFIQRQLVETRQITKHVARILDERFNNELDSKGRRIRKVKIVTLKSNLVSNFRKEFGFYKIREVNNYHHAHDAYLNAVVAKAILTKYPQLEPEFVYGLYRRKKLSKIVREDKEEKYSEATRKMFFYSNLMNMFKRVVRLADGSIVVRPVIETGRYMGKTAWDKKKHFATVRKVLSYPQNNIVKKTEIQTGGFSKESILAHGNSDKLIPRKTKDIYLDPKKYGGFDSPIVAYSVLVVADIKKGKAQKLKTVTELLGITIMERSRFEKNTSAFLESKGYLNIRDDKLMILPKYSLFELENGRRRLLASAGELQKGNELALPTQFMKFLYLASRYNESKGKPEEIEKKQEFVNQHVSYFDDILQLINDFSNRVILADANLEKINKLYQDNKENIPVDELANNIINLFTFTSLGAPAAFKFFDKIVDRKRYTSTKEVLNSTLIHQSITGLYETRIDLGKLGEG

SEQ ID NO: 645 - protein, 1370 aa, Streptococcus agalactiae
MNKPYSIGLDIGTNSVGWSIITDDYKVPAKKMRVLGNTDKEYIKKNLIGALLFDGGNTAADRRLKRTARRRYTRRRNRILYLQEIFAEEMSKVDDSFFHRLEDSFLVEEDKRGSKYPIFATMQEEKYYHEKFPTIYHLRKELADKKEKADLRLIYLALAHIIKFRGHFLIEDDRFDVRNTDIQKQYQAFLEIFDTTFENNDLLSQNVDVEAILTDKISKSAKKDRILARYPNQKSTGIFAEFLKLIVGNQADFKKHFNLEDKTPLQFAKDSYDEDLENLLGQIGDEFADLFSAAKKLYDSVLLSGILTVTDLSTKAPLSASMIQRYDEHREDLKQLKQFVKASLPEKYQEIFADSSKDGYAGYIEGKTNQEAFYKYLSKLLTKQEGSEYLLEKIKNEDFLRKQRTFDNGSIPHQVHLTELRAIIRRQSEYYPFLKENLDRIEKILTFRIPYYVGPLAREKSDFAWMTRKTDDSIRPWNFEDLVDKEKSAEAFIHRMTNNDLYLPEEKVLPKHSLIYEKFTVYNELTKVRFLAEGFKDFQFLNRKQKETIFNSLFKEKRKVTEKDIISFLNKVDGYEGIAIKGIEKQFNASLSTYHDLKKILGKDFLDNTDNELILEDIVQTLTLFEDREMIRKRLDIYKDFFTESQLKKLYRRHYTGWGRLSAKLINGIRNKENQKTILDYLIDDGSANRNFMQLIKDAGLSFKPIIDKARTGSHSDNLKEVVGELAGSPAIKKGILQSLKIVDELVKVMGYEPEQIVVEMARENQTTAKGLSRLRQRLTTLRESLANLKSNILEEKKPKYVKDQVENHHLSDDRLFLYYLQNGKDMYTDDELDIDNLSQYDIDHIIPQAFIKDDSIDNRVLVSSAKNRGKSDDVPSVEIVKDCKVFWKKLLDAKLMSQRKYDNLTKAERGGLTSDDKARFIQRQLVETRQITKHVARILDERFNNELDSKGRRIRKVKIVTLKSNLVSNFRKEFGFYKIREVNNYHHAHDAYLNAVVAKAILTKYPQLEPEFVYGDYPKYNSYKTRKSATEKLFFYSNIMNFFKTKVTLADGTVVVKDDIEVNNDTGEIVWDKKKHFATVRKVLSYPQVNIVKKTEIQTGGFSKESILAHGNSDKLIPRKTKDIYLDPKKYGGFDSPIVAYSVLVVADIKKGKAQKLKTVTELLGITIMERSRFEKNPSAFLESKGYLNIRDDKLMILPKYSLFELENGRRRLLASADELQKGNELALPTQFMKFLYLASRYNELKGKPEEIEQKQEFVVQHVSYFDDILQIINDFSNRVILADANLEKINKLYQDNKENIPVDELANNIINLFTFTSLGAPAAFKFFDKIVDRKRYTSTKEVLNSTLIHQSITGLYETRIDLGKLGED

SEQ ID NO: 646 - protein, 1377 aa, Streptococcus agalactiae
MNKPYSIGLDIGTNSVGWSIITDDYKVPAKKMRVLGNTDKEYIKKNLIGALLFDGGNTAADRRLKRTARRRYTRRRNRILYLQEIFAEEMSKVDDSFFHRLEDSFLVEEDKRGSKYPIFATMQEEKYYHEKFPTIYHLRKELADKKEKADLRLVYLALAHIIKFRGHFLIEDDRFDVRNTDIQKQYQAFLEIFDTTFENNHLLSQNVDVEAILTDKISKSAKKDRILAQYPNQKSTGIFAEFLKLIVGNQADFKKHFNLEDKTPLQFAKDSYDEDLENLLGQIGDEFADLFSVAKKLYDSVLLSGILTVTDLSTKAPLSASMIQRYDEHHEDLKHLKQFVKASLPENYREVFADSSKDGYAGYIEGKTNQEAFYKYLLKLLTKQEGSEYFLEKIKNEDFLRKQRTFDNGSIPHQVHLTELRAIIRRQSEYYPFLKENQDRIEKILTFRIPYYVGPLAREKSDFAWMTRKTDDSIRPWNFEDLVDKEKSAEAFIHRMTNNDLYLPEEKVLPKHSLIYEKFTVYNELTKVRFLAEGFKDFQFLNRKQKETIFNSLFKEKRKVTEKDIISFLNKVDGYEGIAIKGIEKQFNASLSTYHDLKKILGKDFLDNTDNELILEDIVQTLTLFEDREMIKKCLDIYKDFFTESQLKKLYRRHYTGWGRLSAKLINGIRNKENQKTILDYLIDDGSANRNFMQLINDDDLSFKPIIDKARTGSHSDNLKEVVGELAGSPAIKKGILQSLKIVDELVKVMGYEPEQIVVEMARENQTTAKGLSRSRQRLTTLRESLANLKSNILEEKKPKYVKDQVENHHLSDDRLFLYYLQNGRDMYTKKALDIDNLSQYDIDHIIPQAFIKDDSIDNRVLVSSAKNRGKSDDVPSIEIVKARKMFWKNLLDAKLMSQRKYDNLTKAERGGLTSDDKARFIQRQLVETRQITKHVARILDERFNNEVDNGKKICKVKIVTLKSNLVSNFRKEFGFYKIREVNDYHHAHDAYLNAVVAKAILTKYPQLEPEFVYGMYRQKKLSKIVHEDKEEKYSEATRKMFFYSNLMNMFKRVVRLADGSIVVRPVIETGRYMGKTAWDKKKHFATVRKVLSYPQNNIVKKTEIQTGGFSKESILAHGNSDKLIPRKTKDIYLDPKKYGGFDSPIVAYSVLVVADIKKGKAQKLKTVTELLGITIMERSRFEKNPSAFLESKGYLNIRDDKLMILPKYSLFELENGRRRLLASAGELQKGNELALPTQFMKFLYLASRYNESKGKPEEIEKKQEFVNQHVSYFDDILQLINDFSKRVILADANLEKINKLYQDNKENIPVDELANNIINLFTFTSLGAPAAFKFFDKIVDRKRYTSTKEVLNSTLIHQSITGLYETRIDLGKLGED

SEQ ID NO: 647 - protein, 1370 aa, Streptococcus agalactiae
MNKPYSIGLDIGTNSVGWSIITDDYKVPAKKMRVLGNTDKEYIKKNLIGALLFDGGNTAADRRLKRTARRRYTRRRNRILYLQEIFAEEMSKVDDSFFHRLEDSFLVEEDKRGSKYXIFATLQEEKDYHEKFSTIYHLRKELADKKEKADLRLIYIALAHIIKFRGHFLIEDDSFDVRNTDISKQYQDFLEIFNTTFENNDLLSQNVDVEAILTDKISKSAKKDRILAQYPNQKSTGIFAEFLKLIVGNQADFKKYFNLEDKTPLQFAKDSYDEDLENLLGQIGDEFADLFSAAKKLYDSVLLSGILTVIDLSTKAPLSASMIQRYDEHREDLKQLKQFVKASLPEKYQEIFADSSKDGYAGYIEGKTNQEAFYKYLSKLLTKQEDSENFLEKIKNEDFLRKQRTFDNGSIPHQVHLTELKAIIRRQSEYYPFLKENQDRIEKILTFRIPYYIGPLAREKSDFAWMTRKTDDSIRPWNFEDLVDKEKSAEAFIHRMTNNDFYLPEEKVLPKHSLIYEKFTVYNELTKVRYKNEQGETYFFDSNIKQEIFDGVFKEHRKVSKKKLLDFLAKEYEEFRIVDVIGLDKENKAFNASLGTYHDLEKILDKDFLDNPDNESILEDIVQTLTLFEDREMIKKRLENYKDLFTESQLKKLYRRHYTGWGRLSAKLINGIRDKESQKTILDYLIDDGRSNRNFMQLINDDGLSFKSIISKAQAGSHSDNLKEVVGELAGSPAIKKGILQSLKIVDELVKVMGYEPEQIVVEMARENQTTNQGRRNSRQRYKLLDDGVKNLASDLNGNILKEYPTDNQALQNERLFLYYLQNGRDMYTGEALDIDNLSQYDIDHIIPQAFIKDDSIDNRVLVSSAKNRGKSDDVPSLEIVKDCKVFWKKLLDAKLMSQRKYDNLTKAERGGLTSDDKARFIQRQLVETRQITKHVARILDERFNNELDSKGRRIRKVKIVTLKSNLVSNFRKEFGFYKIREVNNYHHAHDAYLNAVVAKAILTKYPQLEPEFVYGDYPKYNSYKTRKSATEKLFFYSNIMNFFKTKVTLADGTVVVKDDIEVNNDTGEIVWDKKKHFATVRKVLSYPQNNIVKKTEIQTGGFSKESILAHGNSDKLIPRKTKDIYLDPKKYGGFDSPIVAYSVLVVADIKKGKAQKLKTVTELLGITIMERSRFEKNPSAFLESKGYLNIRADKLIILPKYSLFELENGRRRLLASAGELQKGNELALPTQFMKFLYLASRYNESKGKPEEIEKKQEFVNQHVSYFDDILQLINDFSKRVILADANLEKINKLYQDNKENISVDELANNIINLFTFTSLGAPAAFKFFDKIVDRKRYTSTKEVLNSTLIHQSITGLYETRIDLGKLGED

SEQ ID NO: 648 - protein, 1370 aa, Streptococcus agalactiae
MNKPYSIGLDIGTNSVGYSVVTDDYKVPAKKMRVLGNTDKEYIKKNLIGALLFDGGNTASDRRLKRTARRRYTRRRNRILYLQEIFAEEMSKVDDSFFHRLEDSFLVEDDKRGSKYPIFATMQEEKDYHEKFPTIYHLRKELADKKEKADLRLVYLALAHIIKFRGHFLIEDDSFDVRNTDIQRQYQAFLEIFDTTFENNHLLSQNIDVEGILTDKISKSAKKDRILAQYPNQKSTGIFAEFLKLIVGNQADFKKHFNLEDKTPLQFAKDSYDEDLENLLGQIGDEFADLFSVAKKLYDSVLLSGILTVTDLSTKAPLSASMIQRYDEHREDLKQLKQFVKASLPEKYQEIFTDSSKDGYAGYIEGKTNQGAFYKYLSKLLTKQEGSEYFLEKIKNEDFLRKQRTFDNGSIPHQVHLTELKAIIRRQSEYYPFLKENLDRIEKILTFRIPYYVGPLAREKSDFAWMTRKTDDSIRPWNFEELVDKEASAEAFIHRMTNNDLYLPEEKVLPKHSLIYEKFTVYNELTKVRYKNEQGETYFFDSNIKQEIFDGVFKEHRKVSKKKLLDFLAKEYEEFRIVDVIGLDKENKAFNASLGTYHDLKKILDKDFLDNPDNESILEDIVQTLTLFEDREMIKKRLENYKDLFTESQLKKLYRRHYTGWGRLSAKLINGIRDKESQKTILDYLISDGRANRNFMQLIHDDGLSFKPIIDKAQAGSHSDNLKEVVGELAGSPAIKKGILQSLKIVDELVKVMGYEPEQVVVEMARENQTTNQGRRNTRQRYKLLEEGVKNLASDLNGNILKEYPTDNQALQNERLFLYYLQNGRDMYTGEALDIDNLSQYDIDHIVPQAFIKDDSIDNRVLVSSAKNRGKSDNVPSIDIVKARKAFWKKLLDAKLMSQRKYDNLTKAERGGLTSDDKARFIQRQLVETRQITKHVARILDERFNNELDSKGRRIRKVKIVTLKSNLVSNFRKEFGFYKIREVNDYHHAHDAYLNAVVAKAILTKYPQLEPEFVYGDYPKYNSYKTRKSATEKLFFYSNIMNFFKTKVTLADGTVVVKDDIEVNNDTGEIVWDKKKHFATVRKVLSYPQVNIVKKTEIQTGGFSKESILAHGNSDKLIPRKTKDIYLDPKKYGGFDSPIVAYSVLVVADIKKGKAQKLKTVTELLGITIMERFRFEKNPSAFLESKGYLNIRDDKLMILPKYSLFELENGRRRLLASAGELQKGNELALPTQYMKFLYLASRYNELKGKPEEIEQKQEFVVQHVSYFDDILQIINDFSNRVILADANLEKINKLYQDNKENISVDELANNIINLFTFTSLGAPAAFKFFDKIVDRKRYTSTKEVLNSTLIHQSITGLYETRIDLGKLGED

SEQ ID NO: 649 - protein, 1370 aa, Streptococcus agalactiae
MNKPYSIGLDIGTNSVGYSVVTDDYKVPAKKMRVLGNTDKEYIKKNLIGALLFDGGNTASDRRLKRTARRRYTRRRNRILYLQEIFAEEMSKVDDSFFHRLEDSFLVEDDKRGSKYPIFATMQEEKDYHEKFPTIYHLRKELADKKEKANLRLVYLALAHIIKFRGHFLIEDDSFDVRNTDIQRQYQAFLEIFDTTFENNHLLSQNIDVEGILTDKISKSAKKDRILAQYPNQKSTGIFAEFLKLIVGNQADFKKHFNLEDKTPLQFAKDSYDEDLENLLGQIGDEFADLFSVAKKLYDSVLLSGILTVTDLSTKAPLSASMIQRYDEHREDLKQLKQFVKASLPEKYQEIFTDSSKDGYAGYIEGKTNQGAFYKYLSKLLTKQEGSEYFLEKIKNEDFLRKQRTFDNGSIPHQVHLTELKAIIRRQSEYYPFLKENLDRIEKILTFRIPYYVGPLAREKSDFAWMTRKTDDSIRPWNFEELVDKEASAEAFIHRMTNNDLYLPEEKVLPKHSLIYEKFTVYNELTKVRYKNEQGETYFFDSNIKQEIFDGVFKEHRKVSKKKLLDFLAKEYEEFRIVDVIGLDKENKAFNASLGTYHDLKKILDKDFLDNPDNESILEDIVQTLTLFEDREMIKKRLENYKDLFTESQLKKLYRRHYTGWGRLSAKLINGIRDKESQKTILDYLISDGRANRNFMQLIHDDGLSFKPIIDKAQAGSHSDNLKEVVGELAGSPAIKKGILQSLKIVDELVKVMGYEPEQVVVEMARENQTTNQGRRNTRQRYKLLEEGVKNLASDLNGNILKEYPTDNQALQNERLFLYYLQNGRDMYTGEALDIDNLSQYDIDHIVPQAFIKDDSIDNRVLVSSAKNRGKSDNVPSIDIVKARKAFWKKLLDAKLMSQRKYDNLTKAERGGLTSDDKARFIQRQLVETRQITKHVARILDERFNNELDSKGRRIRKVKIVTLKSNLVSNFRKEFGFYKIREVNDYHHAHDAYLNAVVAKAILTKYPQLEPEFVYGDYPKYNSYKTRKSATEKLFFYSNIMNFFKTKVTLADGTVVVKDDIEVNNDTGEIVWDKKKHFATVRKVLSYPQVNIVKKTEIQTGGFSKESILAHGNSDKLIPRKTKDIYLDPKKYGGFDSPIVAYSVLVVADIKKGKAQKLKTVTELLGITIMERFRFEKNPSAFLESKGYLNIRDDKLMILPKYSLFELENGRRRLLASAGELQKGNELALPTQYMKFLYLASRYNELKGKPEEIEQKQEFVVQHVSYFDDILQIINDFSNRVILADANLEKINKLYQDNKENISVDELANNIINLFTFTSLGAPAAFKFFDKIVDRKRYTSTKEVLNSTLIHQSITGLYETRIDLGKLGED

SEQ ID NO: 650 - protein, 1370 aa, Streptococcus agalactiae
MNKPYSIGXDIGTNSVGWSIITDDYKVPAKKMRVLGNTDKEYIKKNLIGALLFDGGNTAADRRLKRTARRRYTRRRNRILYLQEIFAEEMSKVDDSFFHRLEDSFLVEEDKRGSKYPIFATLQEEKDYHEKFSTIYHLRKELADKKEKADLRLIYIALAHIIKFRGHFLIEDDSFDVRNTDISKQYQDFLEIFNTTFENNDLLSQNVDVEAILTDKISKSAKKDRILAQYPNQKSTGIFAEFLKLIVGNQADFKKYFNLEDKTPLQFAKDSYDEDLENLLGQIGDEFADLFSAAKKLYDSVLLSGILTVIDLSTKAPLSASMIQRYDEHREDLKQLKQFVKASLPEKYQEIFADSSKDGYAGYIEGKTNQEAFYKYLSKLLTKQEDSENFLEKIKNEDFLRKQRTFDNGSIPHQVHLTELKAIIRRQSEYYPFLKENQDRIEKILTFRIPYYIGPLAREKSDFAWMTRKTDDSIRPWNFEDLVDKEKSAEAFIHRMTNNDFYLPEEKVLPKHSLIYEKFTVYNELTKVRYKNEQGETYFFDSNIKQEIFDGVFKEHRKVSKKKLLDFLAKEYEEFRIVDVIGLDKENKAFNASLGTYHDLEKILDKDFLDNPDNESILEDIVQTLTLFEDREMIKKRLENYKDLFTESQLKKLYRRHYTGWGRLSAKLINGIRDKESQKTILDYLIDDGRSNRNFMQLINDDGLSFKSIISKAQAGSHSDNLKEVVGELAGSPAIKKGILQSLKIVDELVKVMGYEPEQIVVEMARENQTTNQGRRNSRQRYKLLDDGVKNLASDLNGNILKEYPTDNQALQNERLFLYYLQNGRDMYTGEALDIDNLSQYDIDHIIPQAFIKDDSIDNRVLVSSAKNRGKSDDVPSLEIVKDCKVFWKKLLDAKLMSQRKYDNLTKAERGGLTSDDKARFIQRQLVETRQITKHVARILDERFNNELDSKGRRIRKVKIVTLKSNLVSNFRKEFGFYKIREVNNYHHAHDAYLNAVVAKAILTKYPQLEPEFVYGDYPKYNSYKTRKSATEKLFFYSNIMNFFKTKVTLADGTVVVKDDIEVNNDTGEIVWDKKKHFATVRKVLSYPQNNIVKKTEIQTGGFSKESILAHGNSDKLIPRKTKDIYLDPKKYGGFDSPIVAYSVLVVADIKKGKAQKLKTVTELLGITIMERSRFEKNPSAFLESKGYLNIRADKLIILPKYSLFELENGRRRLLASAGELQKGNELALPTQFMKFLYLASRYNESKGKPEEIEKKQEFVNQHVSYFDDILQLINDFSKRVILADANLEKINKLYQDNKENISVDELANNIINLFTFTSLGAPAAFKFFDKIVDRKRYTSTKEVLNSTLIHQSITGLYETRIDLGKLGED

SEQ ID NO: 651 - protein, 1125 aa, Streptococcus anginosus
MNGLVLGLDIGIASVGVGILNKETGEIIHANSRIFPAATADSNVERRGFRQGRRLGRRKKHRSARLNNLFEEFGFITDFSAIPLNLNPYALRVKGLSEELTNEELFIALKNIIKRRGISYLDDASEDGETASNEYGKAVEENRKLLADKTPGQIQLERFEKYGQVRGDFTVVENGENHRLINVFSTSAYKKEAERILRRQQEFNVRISDEFIEAYLTILTGKRKYYHGPGNEKSRTDYGRFRTDGTTLDNIFGILIGKCTFYPDEYRAAKASYTAQEFNLLNDLNNLTVPTETKKLSPEQKRQIVEYARTAKTLGTPTLLKYIAKLVDGSIDDIKGYRIDKSDKPEMHTFDAYRKMRTLDLVNIDALSRETLDDLAHILTLNTESEGILEALNSKMPSTFTKEQIDELIQFRKKNSAVFGKGWHNFSLKLMNELISELYETSEEQMTILTRLGKQRSREISKRTKYIDEKELTEEIYNPVVAKSVRQAIKIINEATKRYGIFDNIVIEMARENNEEDAKKDYIKRQKANQDEKNASMEKAAFQYNGKKELPDSIFHGHKELATKIRLWHQQGERCLYTGKNISIRDLIHNPHQYEIDHILPLSLSFDDGLANKVLVLATANQEKGQRTPFQAIDSMDDAWSYREFKQYVRNSKSLSNKKKDYLLTEEDISKIEVKQKFIERNLVDTRYSSRVVLNTLQEFYKTNDFDTKISVVRGQFTSQLRRKWKIEKSRDTYHHHAVDALIIAASSQLRLWKKQNNPLISYKEGQFVDPETGEILSLTDDEYKELVFRPPYDYFVDTLKSKSFEDSILFSYQVDSKYNRKISDATIYGTRKAQLGKDKQEETYVLGKIKDIYSQKGYEDFIKRYNKDETQFLIYHKDPQTFEKVIEEILKTYPDKELNEKGKEIPCNPFEKYRQENGPIRKYSKKGKGPEIKSLKYYDNKLGNHIDITPVNSQNQVVLQSLKPWRTDVYFNPRTSKYELMGLKYSDLRFEKGSGSYGISPEKYNKVKAKEGVNEDSEFKFTLYKNDLILIKDTETGEQQLFRYGSRNDTSKHYVELKPYEKAKFEGNQQLMNLLGTVAKGGQCLKGINKPNLSIYKVKTDVLGNKYFIKKEGDQPQLNFKKKF

SEQ ID NO: 652 - protein, 1386 aa, Streptococcus anginosus
MNQKYSIGLDIGTNSVGWAVITDDYKVPAKKMKVLGNTDKQSIKKNLLGALLFDSGETAEATRLKRTARRRYTRRRNRLRYLQEIFAEEMMQVDESFFQRLDDSFLVDEDKRGERHPIFGNIAAEVKYHDEFPTIYHLRKHLADISQKADLRLVYLALAHMIKFRGHFLIEGQLKAENTNVQALFKDFVEVYDKTVEESHLSEITVDALSILTEKVSKSRRLENLIAHYPAEKKNTLFGNLIALFLGLQPNFKTNFQLSEDAKLQFSKDTYEEDLEGLLGEVGDEYADLFASAKNLYDAILLSGILTVDDNSTKAPLSASMVKRYEEHQKDLKKFEDFIKVNALDQYNAIFKDKNKKGYAGYIESGVKQDEFYKYLKGILLQINGSGDFLDKIDREDFLRKQRTFDNGSIPHQIHLQEMHAILRRQGEHYPFLKENQDKIEKILTFRIPYYVGPLARKGSRFAWAEYKADEKITPWNFDDILDKEKSAEKFITRMTLNDLYLPEEKVLPKHSLLYETFTVYNELTKVKYVNEQGEAKFFDANMKQEIFDHVFKENRKVTKDKLLNYLNKEFEEFRIVNLTGLDKENKVFNSSLGTYHDLRKILNKSFLDNKENAQIIEDIIQTLTLFEDREMIRQRLQKYSDIFTKAQLKKLERRHYTGWGRLSYKLINGIRNKENKKTILDYLIDDGYANRNFMQLINDDALSFKEEIAKAQIIGDVDDIANVVHDLPGSPAIKKGILQSVKIVDELVKVMGHNPANIIIEMARENQTTDRGRRNSQQRLKLLQDSLKNLDNPVNIKNVENQQLQNDRLFLYYIQNGKDMYTGETLDINNLSQYDIDHIIPQAYIKDDSFDNRVLTSSSENRGKSDNVPSIEVVCARKADWMRLRKAGLISQRKFDNLTKAERGGLTENDKAGFIKRQLVETRQITKHVAQVLDARFNAKHDENKKVIRDVKIITLKSNLVSQFRKDFKFYKVREINDYHHAHDAYLNAVIGTALLKKYPKLASEFVYGEFKKYDVRKFIAKSDKEIGKATAKYFFYSNLMNFFKKEVKFADGTVVERPDIETSEDGEIAWNKQTDFKIVRKVLSYPQVNIVKKTEVQTHGLDRGKPRGLFNANPSPKPKPDSSENLVGVKRNLDPKKYGGYAGISNSYAVLVKAIIEKGVKKKETMVLEFQGISILDRITFEKDKRAFLLGKGYKDIKKIIELPKYSLFELKDGSRRMLASILSTNNKRGEIHKGNELFVPQKFTTLLYHAKRINNPINKDHIEYVKKHRDDFKELLNYVLEFNEKYVGATKNGERLKEAVADFDSKSNEEICTSFLGAVNSKNAGLFELTSLGSASDFEFLGVKIPRYRDYTPSSLLKDSTLIHQSITGLYETRIDLSKLGED

SEQ ID NO: 653 - protein, 1396 aa, Streptococcus anginosus
MTKPYSIGLDIGTNSVGWAVITDDYKVPAKKMKVLGNTNRDYIKKNLLGALLFDGGETAEGRRLKRTARRRYTRRKNRLRYLQEIFAEEMMQVDESFFQRLDDSFLVEEDKQGSKYPIFGTLKEEKEYHKKFKTIYHLREELANSKEKADLRLVYLALAHMIKFRGHFLYEGDLKAENTDVQALFKDFVEEYDKTIEESHLSEITVDALSILTEKVSKSSRLENLIAHYPTEKKNTLFGNLIALSLGLQANFKTNFQLSEDAKLQFSKDTYEEDLEGLLGEVGDEYADLFVSAKNLYDAILLSGILTVDDNSTKAPLSASMVKRYKEHKEELAAFKRFIKEKLPKKYEEIFKDDTKNGYAGYVGADKKLRKRSGKLATEEEFYKYVKGILNKVEGADYFLDKIDREDFLRKQRTFDNGSIPHQIHLQEMHAILRRQGEHYPFLKENQDKIEKILTFRIPYYVGPLARKGSRFAWAEYKADEKITPWNFDDILDKEKSAEKFITRMTLNDLYLPEEKVLPKHSPLYETFTVYNELTKVKYVNEQGEAKFFDTNMKQEIFDHVFKENRKVTKDKLLNYLNKEFEEFRIVNLTGLDKENKAFNASLGTYHDLRKILDKSFLDDKVNEKIIEDIIQTLTLFEDREMIRQRLQKYSDIFTTQQLKELERRHYTGWGRLSYKLINGIRNKENKKTILDYLIDDGYANRNFMQLINDDALSFKEEIARAQIIGDVDDIANVVHDLPGSPAIKKGILQSVKIVDELVKVMGHNPTNIIIEMARENQTTDKGRRNSQQRLKLLQDSLKNLDNPVNIKNVENQQLQNDRLFLYYIQNGKDMYTGETLDINNLSQYDIDHIIPQAFIKDNSLDNRVLTRSDKNRGKSDDVPSIEVVHEMKSFWSKLLSVKLITQRKFDNLTKAERGGLTENDKAGFIKRQLVETRQITKHVAQVLDARFNAKHDENKKVIRDVKIITLKSNLVSQFRKDFKFYKVREINDYHHAHDAYLNAVIGTALLKKYPKLASEFVYGEFKKYDVRKFIAKSDKEIGKATAKYFFYSNLMNFFKKEVKFADGTVVERPDIETSEDGEIAWNKQTDFKIVRKVLSYPQVNIVKKTEVQTHGLDRGKPRGLFNANPSPKPKPDSSENLVGIKRNLDPKKYGGYAGISNSYAVLVKAIIEKGVKKKETMVLEFQGISILDRITFEKDKRAFLLGKGYKDIKKIIELPKYSLFELKDGSRRMLASILSTNNKRGEIHKGNELFVPQKFTTLLYHAKRINNPINKDHIEYVKKHRDDFKELLNYVLEFNEKYVGATKNGERLKEAVADFDSKSNEEICTSFLGAVNSKNAGLFELTSLGSASDFEFLGVKIPRYRDYTPSSLLKDSILIHQSITGLYETRIDLSKLGED

SEQ ID NO: 654 - protein, 1375 aa, Streptococcus canis
MEKKYSIGLDIGTNSVGWAVITDDYKVPSKKFKVLGNTNRKSIKKNLMGALLFDSGETAEATRLKRTARRRYTRRKNRIRYLQEIFANEMAKLDDSFFQRLEESFLVEEDKKNERHPIFGNLADEVAYHRNYPTIYHLRKKLADSPEKADLRLIYLALAHIIKFRGHFLIEGKLNAENSDVAKLFYQLIQTYNQLFEESPLDEIEVDAKGILSARLSKSKRLEKLIAVFPNEKKNGLFGNIIALALGLTPNFKSNFDLTEDAKLQLSKDTYDDDLDELLGQIGDQYADLFSAAKNLSDAILLSDILRSNSEVTKAPLSASMVKRYDEHHQDLALLKTLVRQQFPEKYAEIFKDDTKNGYAGYVGIGIKHRKRTTKLATQEEFYKFIKPILEKMDGAEELLAKLNRDDLLRKQRTFDNGSIPHQIHLKELHAILRRQEEFYPFLKENREKIEKILTFRIPYYVGPLARGNSRFAWLTRKSEEAITPWNFEEVVDKGASAQSFIERMTNFDEQLPNKKVLPKHSLLYEYFTVYNELTKVKYVTERMRKPEFLSGEQKKAIVDLLFKTNRKVTVKQLKEDYFKKIECFDSVEIIGVEDRFNASLGTYHDLLKIIKDKDFLDNEENEDILEDIVLTLTLFEDREMIEERLKTYAHLFDDKVMKQLKRRHYTGWGRLSRKMINGIRDKQSGKTILDFLKSDGFSNRNFMQLIHDDSLTFKEEIEKAQVSGQGDSLHEQIADLAGSPAIKKGILQTVKIVDELVKVMGHKPENIVIEMARENQTTTKGLQQSRERKKRIEEGIKELESQILKENPVENTQLQNEKLYLYYLQNGRDMYVDQELDINRLSDYDVDHIVPQSFIKDDSIDNKVLTRSVENRGKSDNVPSEEVVKKMKNYWRQLLNAKLITQRKFDNLTKAERGGLSEADKAGFIKRQLVETRQITKHVARILDSRMNTKRDKNDKPIREVKVITLKSKLVSDFRKDFQLYKVRDINNYHHAHDAYLNAVVGTALIKKYPKLESEFVYGDYKVYDVRKMIAKSEQEIGKATAKRFFYSNIMNFFKTEVKLANGEIRKRPLIETNGETGEVVWNKEKDFATVRKVLAMPQVNIVKKTEVQTGGFSKESILSKRESAKLIPRKKGWDTRKYGGFGSPTVAYSILVVAKVEKGKAKKLKSVKVLVGITIMEKGSYEKDPIGFLEAKGYKDIKKELIFKLPKYSLFELENGRRRMLASATELQKANELVLPQHLVRLLYYTQNISATTGSNNLGYIEQHREEFKEIFEKIIDFSEKYILKNKVNSNLKSSFDEQFAVSDSILLSNSFVSLLKYTSFGASGGFTFLDLDVKQGRLRYQTVTEVLDATLIYQSITGLYETRTDLSQLGGD

SEQ ID NO: 655 - protein, 1345 aa, Streptococcus constellatus
MGKPYSIGLDIGTNSVGWAVVTDDYKVPAKKMKVLGNTDKQSIKKNLLGALLFDSGETAEATRLKRTARRRYTRRKNRLRYLQEIFTGEMNKVDENFFQRLDDSFLVDEDKRGEHHPIFGNIAAEVKYHDDFPTIYHLRRHLADTSKKADLRLVYLALAHMIKFRGHFLYEGDLKAENTDVQALFKDFVEEYDKTIEESHLSEITVDALSILTEKVSKSSRLENLIAHYPTEKKNTLFGNLIALSLDLHPNFKTNFQLSEDAKLQFSKDTYEEDLEGFLGEVGDEYADLFASAKNLYDAILLSGILTVDDNSTKAPLSASMVKRYEEHQKDLKKLKDFIKVNAPDQYNAIFKDKNKKGYASYIESGVKQDEFYKYLKGILLKINGSGDFLDKIDREDFLRKQRTFDNGSIPHQIHLQEMHAILRRQGEHYPFLKENQDKIEKILTFRIPYYVGPLARKGSRFAWAEYKADEKITPWNFDDILDKEKSAEKFITRMTLNDLYLPEEKVLPKHSPLYEAFTVYNELTKVKYVNEQGEAKFFDTNMKQEIFDHVFKENRKVTKDKLLNYLNKEFEEFRIVNLTGLDKENKAFNSSLGTYHDLRKILDKSFLDDKANEKTIEDIIQTLTLFEDREMIRQRLQKYSDIFTKAQLKKLERRHYTGWGRLSYKLINGIRNKENKKTILDYLIDDGYANRNFMQLINDDALSFKEEIARAQIIDDVDDIANVVHDLPGSPAIKKGILQSVKIVDELVKVMGHNPANIIIEMARENQTTDKGRRNSQQRLKLLQDSLKNLDNPVNIKNVENQQLQNDRLFLYYIQNGKDMYTGETLDINNLSQYDIDHIIPQAFIKDNSLDNRVLTRSDKNRGKSDDVPSIEVVHEMKSFWSKLLSVKLITQRKFDNLTKAERGGLTEEDKAGFIKRQLVETRQITKHVAQILDERFNTEFDGNKRRIRNVKIITLKSNLVSNFRKEFELYKVREINDYHHAHDAYLNAVVGNALLLKYPQLEPEFVYGEYPKYNSYRSRKSATEKFLFYSNILRFFKKEDIQTNEDGEIAWNKEKHIKILRKVLSYPQVNIVKKTEEQTGGFSKESILPKGESDKLIPRKTKNSYWDPKKYGGFDSPVVAYSILVFADVEKGKSKKLRKVQDMVGITIMEKKRFEKNPVDFLEQRGYRNVRLEKIIKLPKYSLFELENKRRRLLASAKELQKGNELVIPQRFTTLLYHSYRIEKDYEPEHREYVEKHKDEFKELLEYISVFSRKYVLADNNLTKIEMLFSKNKDAEVSSLAKSFISLLTFTAFGAPAAFNFFGENIDRKRYTSVTECLNATLIHQSITGLYETRIDLSKLGED

SEQ ID NO: 656 - protein, 538 aa, Streptococcus dysgalactiae
DYDVDHIVPQSFIKDDSIDNKVLTRSDKNRGKSDNVPSEEVVKKMKNYWRQLLNAKLITQRKFDNLTKAERGGLSELDKAGFIKRQLVETRQITKHVAQILDSRMNTKYDENDKLIREVKVITLKSKLVSDFRKDFQFYKVREINNYHHAHDAYLNAVVGTALIKKYPKLESEFVYGDYKVYDVRKMIAKSEQEIGKATAKRFFYSNIMNFFKTEITLANGEIRKRPLIETNEETGEIVWDKGRDFATVRKVLSMPQVNIVKKTEVQTGALTNESIYARGSFDKLISRKHRFESSKYGGFGSPTVTYSVLVVAKSKVQDGKVKKIKTGKELIGITLLDKLVFEKNPLKFIEDKGYGNVQIDKCIRLPKYSLFEFENGTRRMLASVMANNNSRGDLQKANEMFLPAKLVTLLYHAHKIESSKELEHEAYILDHYNDLYQLLSYIERFASLYVDVEKNISKVKELFSNIESYSISEICSSVINLLTLTASGAPADFKFLGTTIPRKRYGSPQSILSSTLIHQSITGLYETRIDLSQLGGD

SEQ ID NO: 657 - protein, 1155 aa, Streptococcus dysgalactiae
MDKKYSIGLDIGTNSVGWAVITDDYKVPSKKFKVLGNTDRHSIKKNLIGALLFDSGETAEATRLKRSARRRYTRRKNRIRYLQEIFSSEMSKVDDSFFHRLEESFLVEEDKKHERHPIFGNIVDEVAYHEKYPTIYHLRKKLADSTDKADLRLIYLALAHMIKFRGHFLIEGDLNPDNSDMDKLFIQLVQTYNQLFEENPINASRVDAKAILSARLSKSRRLENLIAQLPGEKRNGLFGNLIALSLGLTPNFKSNFDLAEDAKLQLSKDTYDDDLDNLLAQIGDQYADLFLAAKNLSDAILLSDILRVNSEITKAPLSASMIKRYDEHHQDLTLLKALVRQQLPEKYKEIFFDQSKNGYAGYIDGGASQEEFYKFIKPILEKMDGTEELLAKLNREDLLRKQRTFDNGSIPHQIHLGELHAILRRQEDFYPFLKDNREKIEKILTFRIPYYVGPLARGNSRFAWMTRKSEETITPWNFEEVVDKGASAQSFIERMTNFDKNLPNEKVLPKHSLLYEYFTVYNELTKVKYVTEGMRKPEFLSGKQKEAIVDLLFKTNRKVTVKQLKEDYFKKIECFDSVEISGVEDRFNASLGTYHDLLKIIKDKDFLDNEENEDILEDIVLTLTLFEDKEMIEERLKTYAHLFDDKVMKQLKRRHYTGWGRLSRKLINGIRDKQSGKTILDFLKSDGFANRNFIQLIHDDSLTFKEAIQKAQVSGQGHSLHEQIANLAGSPAIKKGILQSVKVVDELVKVMGHKPENIVIEMARENQTTQKGQKNSRERMKRIEEGIKELGSQILKEHPVENTQLQNEKLYLYYLQNRRDMYVDQELDINRLSDYDVDHIVPQSFIKDDSIDNKVLTRSDKNRGKSDDVPSEEVVKKMKNYWRQLLNAKLITQRKFDNLTKAERGGLSELDKAGFIKRQLVETRQITKHVAQILDSRMNTKYDENDKLIREVKVITLKSKLVSDFRKDFQFYKVREINNYHHAHDAYLNAVVGTALIKKYPKLESEFVYGDYKVYDVRKMIAKSEQEIGKATAKRFFYSNIMNFFKTEITLANGEIRKRPLIETNEETGEIVWDKGRDFATVRKVLSMPQVNIVKKTEVQTGALTNESIYARGSFDKLISRKHRFESSKYGGFGSPTVTYSVLVVAKYQSYKMEK

SEQ ID NO: 658 - protein, 1371 aa, Streptococcus dysgalactiae
MDKKYSIGLDIGTNSVGWAVITDDYKVPSKKFKVLGNTDRHSIKKNLIGALLFDSGETAEATRLKRTARRRYTRRKNRIRYLQEIFSSEMSKVDDSFFHRLEESFLVEEDKKHERHPIFGNIVDEVAYHEKYPTIYHLRKKLADSTDKADLRLIYLALAHMIKFRGHFLIEGDLNPDNSDMDKLFIQLVQTYNQLFEENPINASRVDAKAILSARLSKSRRLENLIAQLPGEKRNGLFGNLIALSLGLTPNFKSNFDLAEDAKLQLSKDTYDDDLDNLLAQIGDQYADLFLAAKNLSDAILLSDILRVNSEITKAPLSASMIKRYDEHHQDLTLLKALVRQQLPEKYKEIFFDQSKNGYAGYIDGGASQEEFYKFIKPILEKMDGTEELLAKLNREDLLRKQRTFDNGSIPHQIHLGELHAILRRQEDFYPFLKDNREKIEKILTFRIPYYVGPLARGNSRFAWMTRKSEETITPWNFEEVVDKGASAQSFIERMTNFDKNLPNEKVLPKHSLLYEYFTVYNELTKVKYVTEGMRKPEFLSGKQKEAIVDLLFKTNRKVTVKQLKEDYFKKIECFDSVEISGVEDRFNASLGTYHDLLKIIKDKDFLDNEENEDILEDIVLTLTLFEDKEMIEERLKTYAHLFDDKVMKQLKRRHYTGWGRLSRKLINGIRDKQSGKTILDFLKSDGFANRNFIQLIHDDSLTFKEAIQKAQVSGQGHSLHEQIANLAGSPAIKKGILQSVKVVDELVKVMGHKPENIVIEMARENQTTQKGQKNSRERMKRIEEGIKELGSQILKEHPVENTQLQNEKLYLYYLQNGRDMYVDQELDINRLSDYDVDHIVPQSFIKDDSIDNKVLTRSDKNRGKSDDVPSEEVVKKMKNYWRQLLNAKLITQRKFDNLTKAERGGLSELDKAGFIKRQLVETRQITKHVAQILDSRMNTKYDENDKLIREVKVITLKSKLVSDFRKDFQFYKVREINNYHHAHDAYLNAVVGTALIKKYPKLESEFVYGDYKVYDVRKMIAKSEQEIGKATAKRFFYSNIMNFFKTEITLANGEIRKRPLIETNEETGEIVWNKGRDFATVRKVLSMPQVNIVKKTEVQTGALTNESIYARGSFDKLISRKHRFESSKYGGFGSPTVTYSVLVVAKSKVQDGKVKKIKTGKELIGITLLDKLVFEKNPLKFIEDKGYGNVQIDKCIKLPKYSLFEFENGTRRMLASVMANNNSRGDLQKANEMFLPAKLVTLLYHAHKIESSKELEHEAYILDHYNDLYQLLSYIERFASLYVDVEKNISKVKELFSNIESYSISEICSSVINLLTLTASGAPADFKFLGTTIPRKRYGSPQSILSSTLIHQSITGLYETRIDLSQLGGD

SEQ ID NO: 659 - protein, 1371 aa, Streptococcus dysgalactiae
MDKKYSIGLDIGTNSVGWAVITDDYKVPSKKFKVLGNTDRHSIKKNLIGALLFDSGETAEATRLKRTARRRYTRRKNRIRYLQEIFSSEMSKVDDSFFHRLEESFLVEEDKKHERHPIFGNIVDEVAYHEKYPTIYHLRKKLADSTDKADLRLIYLALAHMIKFRGHFLIEGDLNPDNSDMDKLFIQLVQTYNQLFEENPINASRVDAKAILSARLSKSRRLENLIAQLPGEKRNGLFGNLIALSLGLTPNFKSNFDLAEDAKLQLSKDTYDDDLDNLLAQIGDQYADLFLAAKNLSDAILLSDILRVNSEITKAPLSASMIKRYDEHHQDLTLLKALVRQQLPEKYKEIFFDQSKNGYAGYIDGGASQEEFYKFIKPILEKMDGTEELLAKLNREDLLRKQRTFDNGSIPHQIHLGELHAILRRQEDFYPFLKDNREKIEKILTFRIPYYVGPLARGNSRFAWMTRKSEETITPWNFEEVVDKGASAQSFIERMTNFDKNLPNEKVLPKHSLLYEYFTVYNELTKVKYVTEGMRKPEFLSGKQKEAIVDLLFKTNRKVTVKQLKEDYFKKIECFDSVEISGVEDRFNASLGTYHDLLKIIKDKDFLDNEENEDILEDIVLTLTLFEDKEMIEERLKKYANLFDDKVMKQLKRRHYTGWGRLSRKLINGIRDKQSGKTILDFLKSDGFANRNFMQLINDDSLTFKEAIQKAQVSGQGHSLHEQIANLAGSPAIKKGILQSVKVVDELVKVMGHKPENIVIEMARENQTTQKGQKNSRERMKRIEEGIKELGSQILKEHPVENTQLQNEKLYLYYLQNGRDMYVDQELDINRLSDYDVDHIVPQSFIKDDSIDNKVLTRSDKNRGKSDNVPSEEVVKKMKNYWRQLLNAKLITQRKFDNLTKAERGGLSELDKAGFIKRQLVETRQITKHVAQILDSRMNTKYDENDKLIREVKVITLKSKLVSDFRKDFQFYKVREINNYHHAHDAYLNAVVGTALIKKYPKLESEFVYGDYKVYDVRKMIAKSEQEIGKATAKRFFYSNIMNFFKTEITLANGEIRKRPLIETNEETGEIVWDKGRDFATVRKVLSMPQVNIVKKTEVQTGALTNESIYARGSFDKLISRKHRFESSKYGGFGSPTVTYSVLVVAKSKVQDGKVKKIKTGKELIGITLLDKLVFEKNPLKFIEDKGYGNVQIDKCIKLPKYSLFEFENGTRRMLASVMANNNSRGDLQKANEMFLPAKLVTLLYHAHKIESSKELEHEAYILDHYNDLYQLLSYIERFASLYVDVEKNISKVKELFSNIESYSISEICSSVINLLTLTASGAPADFKFLGTTIPRKRYGSPQSILSSTLIHQSITGLYETRIDLSQLGGD

SEQ ID NO: 660 - protein, 1371 aa, Streptococcus dysgalactiae
MDKKYSIGLDIGTNSVGWAVITDDYKVPSKKFKVLGNTDRHSIKKNLIGALLFDSGETAEATRLKRTARRRYTRRKNRIRYLQEIFSSEMSKVDDSFFHRLEESFLVEEDKKHERHPIFGNIVDEVAYHEKYPTIYHLRKKLADSTDKADLRLIYLALAHMIKFRGHFLIEGDLNPDNSDVDKLFIQLVQTYNQLFEEKPINASGVDAKAILSARLSKSKRLENLIAQLPGEKKNGLFGNLIALSLGLTPNFKSNFDLAEDAKLQLSKDTYDDDLDNLLAQIGNQYADLFLAAKNLSDAILLSDILRVNSEITKAPLSASMIKRYDEHHQDLTLLKALVRQQLPEKYKEIFFDQSKNGYAGYIDGGASQEEFYKFIKPILEKMDGTEELLAKLNREDLLRKQRTFDNGSIPHQIHLGELHAILRRQEDFYPFLKDNREKIEKILTFRIPYYVGPLARGNSRFAWMTRKSEETITPWNFEEVVDKGASAQSFIERMTNFDKNLPNEKVLPKHSLLYEYFTVYNELTKVKYVTEGMRKPEFLSGKQKEAIVDLLFKTNRKVTVKQLKEDYFKKIECFDSVEISGVEDRFNASLGTYHDLLKIIKDKDFLDNEENEDILEDIVLTLTLFEDKEMIEERLKKYANLFDDKVMKQLKRRHYTGWGRLSRKLINGIRDKQSGKTILDFLKSDGFANRNFMQLINDDSLTFKEAIQKAQVSGQGHSLHEQIANLAGSPAIKKGILQSVKVVDELVKVMGHKPENIVIEMARENQTTQKGQKNSRERMKRIEEGIKELGSQILKEHPVENTQLQNEKLYLYYLQNGRDMYVDQELDINRLSDYDVDHIVPQSFIKDDSIDNKVLTRSDKNRGKSDNVPSEEVVKKMKNYWRQLLNAKLITQRKFDNLTKAERGGLSELDKAGFIKRQLVETRQITKHVAQILDSRMNTKYDENDKLIREVKVITLKSKLVSDFRKDFQFYKVREINNYHHAHDAYLNAVVGTALIKKYPKLESEFVYGDYKVYDVRKMIAKSEQEIGKATAKRFFYSNIMNFFKTEITLANGEIRKRPLIETNEETGEIVWDKGRDFATVRKVLSMPQVNIVKKTEVQTGALTNESIYARGSFDKLISRKHRFESSKYGGFGSPTVTYSVLVVAKSKVQDGKVKKIKTGKELIGITLLDKLVFEKNPLKFIEDKGYGNVQIDKCIKLPKYSLFEFENGTRRMLASVMANNNSRGDLQKANEMFLPAKLVTLLYHAHKIESSKELEHEAYILDHYNDLYQLLSYIERFASLYVDVEKNISKVKELFSNIESYSISEICSSVINLLTLTASGAPADFKFLGTTIPRKRYGSPQSILSSTLIHQSITGLYETRIDLSQLGGD

SEQ ID NO: 661 - protein, 1370 aa, Streptococcus gallolyticus; identical to SEQ ID NO: 209

SEQ ID NO: 662 - protein, 1375 aa, Streptococcus infantarius
MEKSYSIGLDIGTNSVGWAVITDDYKVPAKKMKVLGNTDKKYIKKNLLGALLFDSGETAEVTRLKRTARRRYTRRKNRLRYLQEIFAKEMTKVDESFFQRLEESFLTDDDKTFDSHPIFGNKAEEDAYHQKFPTIYHLRKYLADSQEKADLRLVYLALAHMIKYRGHFLIEGELNAENTDVQKLFNVFVETYDKIVDESHLSEIEVDASSILTEKVSKSRRLENLIKQYPTEKKNTLFGNLIALALGLQPNFKTNFKLSEDAKLQFSKDTYEEDLEELLGKVGDDYADLFISAKNLYDAILLSGILTVDDNSTKAPLSASMIKRYVEHHEDLEKLKEFIKINKLKLYHDIFKDKTKNGYAGYIDNGVKQDEFYKYLKTILTKIDDSDYFLDKIERDDFLRKQRTFDNGSIPHQIHLQEMHSILRRQGDYYPFLKENQAKIEKILTFRIPYYVGPLARKDSRFAWANYHSDEPITPWNFDEVVDKEKSAEKFITRMTLNDLYLPEEKVLPKHSHVYETFTVYNELTKIKYVNEQGESFFFDANMKQEIFDHVFKENRKVTKAKLLSYLNNEFEEFRINDLIGLDKDSKSFNASLGTYHDLKKILDKSFLDDKTNGQIIEDIVLTLTLFEDRDMIHERLQKYSDFFTSQQLKKLERRHYTGWGRLSYKLINGIRNKENNKTILDFLIDDGHANRNFMQLINDESLSFKTIIQEAQVVGDVDDIEAVVHDLPGSPAIKKGILQSVKIVDELVKVMGDNPDNIVIEMARENQTTGYGRNKSNQRLKRLQDSLKEFGSDILSKKKPSYVDSKVENSHLQNDRLFLYYIQNGKDMYTGEELDIDRLSDYDIDHIIPQAFIKDNSIDNKVLTSSAKNRGKSDDVPSIEIVRNRRSYWYKLYKSGLISKRKFDNLTKAERGGLTEADKAGFIKRQLVETRQITKHVAQILDARFNTKRDENDKVIRDVKVITLKSNLVSQFRKEFKFYKVREINDYHHAHDAYLNAVVGTALLKKYPKLTPEFVYGEYKKYDVRKLIAKSSDDYSEMGKATAKYFFYSNLMNFFKTEVKYADGRVFERPDIETNADGEVVWNKQKDFDIVRKVLSYPQVNIVKKVEAQTGGFSKESILSKGDSDKLIPRKTKKVYWNTKKYGGFDSPTVAYSVLVVADIEKGKAKKLKTVKELVGISIMERSFFEENPVSFLEKKGYHNVQEDKLIKLPKYSLFEFEGGRRRLLASATELQKGNEVMLPAHLVELLYHAHRIDSFNSTEHLKYVSEHKKEFEKVLSCVENFSNLYVDVEKNLSKVRAAAESMTNFSLEEISASFINLLTLTALGAPADFNFLGEKIPRKRYTSTKECLSATLIHQSVTGLYETRIDLSKLGEE

SEQ ID NO: 663 - protein, 1368 aa, Streptococcus iniae
MRKPYSIGLDIGTNSVGWAVITDDYKVPSKKMRIQGTTDRTSIKKNLIGALLFDNGETAEATRLKRTTRRRYTRRKYRIKELQKIFSSEMNELDIAFFPRLSESFLVSDDKEFENHPIFGNLKDEITYHNDYPTIYHLRQTLADSDQKADLRLIYLALAHIIKFRGHFLIEGNLDSENTDVHVLFLNLVNIYNNLFEEDIVETASIDAEKILTSKTSKSRRLENLIAEIPNQKRNMLFGNLVSLALGLTPNFKTNFELLEDAKLQISKDSYEEDLDNLLAQIGDQYADLFIAAKKLSDAILLSDIITVKGASTKAPLSASMVQRYEEHQQDLALLKNLVKKQIPEKYKEIFDNKEKNGYAGYIDGKTSQEEFYKYIKPILLKLDGTEKLISKLEREDFLRKQRTFDNGSIPHQIHLNELKAIIRRQEKFYPFLKENQKKIEKLFTFKIPYYVGPLANGQSSFAWLKRQSNESITPWNFEEVVDQEASARAFIERMTNFDTYLPEEKVLPKHSPLYEMFMVYNELTKVKYQTEGMKRPVFLSSEDKEEIVNLLFKKERKVTVKQLKEEYFSKMKCFHTVTILGVEDRFNASLGTYHDLLKIFKDKAFLDDEANQDILEEIVWTLTLFEDQAMIERRLVKYADVFEKSVLKKLKKRHYTGWGRLSQKLINGIKDKQTGKTILGFLKDDGVANRNFMQLINDSSLDFAKIIKNEQEKTIKNESLEETIANLAGSPAIKKGILQSIKIVDEIVKIMGQNPDNIVIEMARENQSTMQGIKNSRQRLRKLEEVHKNTGSKILKEYNVSNTQLQSDRLYLYLLQDGKDMYTGKELDYDNLSQYDIDHIIPQSFIKDNSIDNTVLTTQASNRGKSDNVPNIETVNKMKSFWYKQLKSGAISQRKFDHLTKAERGALSDFDKAGFIKRQLVETRQITKHVAQILDSRFNSNLTEDSKSNRNVKIITLKSKMVSDFRKDFGFYKLREVNDYHHAQDAYLNAVVGTALLKKYPKLEAEFVYGDYKHYDLAKLMIQPDSSLGKATTRMFFYSNLMNFFKKEIKLADDTIFTRPQIEVNTETGEIVWDKVKDMQTIRKVMSYPQVNIVMKTEVQTGGFSKESIWPKGDSDKLIARKKSWDPKKYGGFDSPIIAYSVLVVAKIAKGKTQKLKTIKELVGIKIMEQDEFEKDPIAFLEKKGYQDIQTSSIIKLPKYSLFELENGRKRLLASAKELQKGNELALPNKYVKFLYLASHYTKFTGKEEDREKKRSYVESHLYYFDEIMQIIVEYSNRYILADSNLIKIQNLYKEKDNFSIEEQAINMLNLFTFTDLGAPSAFKFFNGDIDRKRYSSTNEIINSTLIYQSPTGLYETRIDLSKLGGK

SEQ ID NO: 664 - protein, 1392 aa, Streptococcus mitis
MNNNNYSIGLDIGTNSVGWAVITDDYKVPSKKMKVLGNTDKHFIKKNLIGALLFDEGATAEDRRFKRTARRRYTRRKNRLRYLQEIFSEEMSKVDSSFFHRLDDSFLVPEDKRGSKYPIFATLAEEKEYHKKFPTIYHLRKHLADSKEKTDLRLIYLALAHMIKYRGHFLYEESFDIKNNDIQKIFSEFISIYDNTFEGSSLSGQNAQVEAIFTDKISKSAKRERILKLFAYEKSTDLFSEFLKLIVGNQADFKKHFDLEEKAPLQFSKDTYDEDLENLLGQIGDDFADLFLVAKKLYDAILLSGILTVTDSSTKAPLSASMIERYENHQKDLAALKQFIQNNLQEKYDEVFSDQSKDGYARYINGKTTQEAFYKYIKNLLSKFEGSDYFLDKIEREDFLRKQRTFDNGSIPHQIHLQEMNAIIRRQGEHYPFLKEYKEKIETILTFRIPYYVGPLARGNRNFAWLTRNSDQAIRPWNFEEIVDQASSAEEFINKMTNYDLYLPEEKVLPKHSLLYETFAVYNELTKVKFISEGLRDYQFLDSGQKKQIVNQLFKEKRKVTEKDIIQYLHNVDGYDGIELKGIEKQFNASLSTYHDLLKIIKDKEFMDDPKNEEILENIVHTLTIFEDREMIKQRLAQYASIFDKKVIKALTRRHYTGWGKLSAKLINGICDKKTGKTILDYLIDDGYSNRNFMQLINDDGLSFKDIIQKAQVVGKTNDVKQVVQELPGSPAIKKGILQSIKLVDELVKVMGHAPESIVIEIARENQTTARGKKNSQQRYKRIEDALKNLAPGLDSNILKEHPTDNIQLQNDRLFLYYLQNGKDMYTGEALDINQLSSYDIDHIVPQAFIKDDSLDNRVLTSSKDNRGKSDNVPSLEVVQKRKAFWQQLLDSKLISEHKFNNLTKAERGGLDERDKVGFIRRQLVETRQITKHVAQILDARFNTEVNEKDKKNRTVKIITLKSNLVSNFRKEFKLYKVREINDYHHAHDAYLNAVVAKAILKKYPKLEPGFVYGDYQKYDIKRYISRSKDPKEVEKATEKYFFYSNLLNFFKEEVHYADGTIVKRENIEYSKDTGEIAWNKEKDFATIKKVLSLPQVNIVKKTEIQTHGLDRGKPRGLFNSNPSPKPSEDRKENLVPIKQGLDPRKYGGYAGISNSYAVLVKAIIEKGAKKQQKTVLEFQGISILDKINFEKNKENYLLEKGYIKILSTITLPKYSLFEFPDGTRRRLASILSTNNKRGEIHKGNELVIPEKYTTLLYHAKNINKTLEPEHLEYVEKHRNDFAKLLEYVLNFNDKYVGALKNGERIRQAFIDWETVDIEKLCFSFIGPRNSKNAGLFELTSQGSASDFEFLGVKIPRYRDYTPSSLLNATLIHQSITGLYETRIDLSKLGED

SEQ ID NO: 665 - protein, 1134 aa, Streptococcus mutans
MANGKILGLDIGIASVGVGIIDKETGKIIHVNSRIFPAATADSNVERRGFRQGRRLVRRKKHRKVRLADLFLDSNLLTDFSKVSLNLNPYQLRVKGLNEELSNEELFIALKSIVSRRGISYLDDASEDSGANSSEYGKAVEENRKLLEDRTPGQIQLERFEKYGKVRGDFTVVENGENHRLINVFSTSAYKKEAERILRRQQEFNMRIADEFIEAYLTILTGKRKYYHGPGNEKSRTDYGRFRTDGTTLDNIFGILIGKCTFYPDEYRAAKASYTAQEFNLLNDLNNLTVPTETKKLSEEQKRQIIEHAKTVKTLGAPTLLKYIVKLVGCSADDIKGYRIDKSDKPEIHTFEAYRKMRTMELIKVDDLSRESLDALAHILTLNTEREGIEEAIRDRFTNKEFNQEQINELVLFRKNNSSLFGKGWHNFSLKLMKELIPELYETSEEQMTILTRLGKQRVKKSSNRTNYIDEKELTEEIYNPVVAKSVRQAIKIINLATKKYGVFDNIVIEMARESNEDDEKKAIQNAQKANEDEKKAALLKAAHQFNGKEELPDSIFHGHKELLTKIRLWHQQGEKCLYTGKTIFINDLIHNPYKYEIDHILPLSLSFDDSLANKVLVLSTANQEKGQRTPFQSLDSMDGAWTYREFKSYVKGLKTLSNKKKDYLLTEENIDKIEVKQKFIERNLVDTRYSSRVVLNALQDFYKERKFDTKISVVRGQFTSQLRRKWRIEKTRETYHHHAVDALIIAASSQLNLWKKQNNPLISYKEDQFVDPETGEILSLSDDEYKKLVFKAPYEHFVDTLKSKKFEDSILFSYQVDSKYNRKISGATICGTRKAQLGKDTQEETYVLGKIKDIYSQKGYEDFIKKYKKDKTQFLMYHKDPQTFEKVIEEILKTYPDKELNEKGKEVSCNPFEKYRQENGPVRKYSKKGNGPEIKSLKYYDEVLGKNIDITPKNSLNKVVLRSLNPWRTDVYFNHETRKYEFLGLKYSDLRYLKGEHRYGILIGDYKKIKDKEGIEKESEFKFTLYKNDLILIKDTAKGKEELFRFWSRTGKDNAKTFEKNKIELKPYSKSQFEKGEDTNVLGKLYASSNQLQKSFGTLENLSIYKVRTDVLGNKYFIKKEGDKPQLNFKKKL

SEQ ID NO: 666 - protein, 1134 aa, Streptococcus mutans; identical to SEQ ID NO: 665

SEQ ID NO: 667 - protein, 1128 aa, Streptococcus mutans
MANSKILGLDIGIASVGVGIIDKETGKIIHVNSRIFPAATADSNVERRGFRQGRRLVRRKKHRKVRLADLFLDSNLLTDFSKVSLNLNPYQLRVKGLNEELSNEELFIALKSIVSRRGISYLDDASEDSGANSSEYGKAVEENRKLLEDRTPGQIQLERFEKYGKVRGDFTVVENGENHRLINVFSTSAYKKEAERILRRQQEFNIRIADEFIEAYLTILTGKRKYYHGPGNEKSRTDYGRFRTDGTTLDNIFGILIGKCTFYPDEYRAAKASYTAQEFNLLNDLNNLTVPTETKKLSEEQKRQIIEHAKTVKTLGAPTLLKYIAKLVGCSADDIKGYRIDKSDKPEIHTFEAYRKMRTMELIKVADLSRESLDALAHILTLNTEREGIEEAIRDRFTNKEFNQEQINELVLFRKNNSSLFGKGWHNFSLKLMKELIPELYETSEEQMTILTRLGKQRVKKSSNRTNYIDEKELTEEIYNPVVAKSVRQAIKIINLATKKYGVFDNIVIEMARESNEDDEKKAIQNAQKANEDEKEAALLKAAHQFNGKEELPDSIFHGHKELLTKIRLWHQQGEKCLYTGKTIFINDLIHNPYKYEIDHILPLSLSFDDSLANKVLVLSTANQEKGQRTPFQSLDSMDGAWTYREFKAYVKGLKTLSNKKKDYLLNEEDINKNEVKQKFIERNLVDTRYSSRVVLNTLQDFYKKREFDTKISVVRGQFTSQIRRKWRIEKTRETYHHHAVDALIIAASSQLNLWKKQNNPLISYKEDQFVDPETGEILSLSDDEYKELVFKAPYDHFVDTLKSKKFEDSILFSYQVDSKYNRKISDATIYGTRKARLGKDSQEETYVLGKIKDIYSQKGYEDFIKKYKKDKTQFLMYHKDPQTFEKVIEEILKTYSDKELNEKGKEVPCNPFEKYRQENGPVRKYSKKGNGPEIKSIKYYDNKLGNHIDITPNNSHHQVVLQSLKPWRTDVYFNPKSGKYELMGLKYSDLRFEKVSGDYGISVKKYNEIKSKEGVDENSEFKFTLYKNDLILIKDTESGEQELFRFLSRTMPNQKHYVELKPYDKSKFEGHQKLMDIFGEVAKGGQCLKGLNKSNISIYKVKTDVLGNKYFIKKEGDQPQLNFKKKI

SEQ ID NO: 668 - protein, 1128 aa, Streptococcus mutans; identical to SEQ ID NO: 667

SEQ ID NO: 669 - protein, 1338 aa, Streptococcus mutans
MDLIGTNSVGWAVVTDDYKVPAKKMKVLGNTDKSHIKKNLLGALLFDSGNTAADRRLKRTARRRYTRRRNRILYLQEIFAEEMSKVDDSFFHRLEDSFLVTEDKRGERHPIFGNLEEEVKYHENFPTIYHLRQYLADNPEKVDLRLVYLALAHIIKFRGHFLIEGKFDTRNNDVQRLFQEFLAVYDNTFENSSLQEQNVQVEEILTDKISKSAKKDRVLKLFPNEKSNGRFAEFLKLIVGNQADFKKHFELEEKAPLQFSKDTYEEELEVLLAQIGDNYAELFLSAKKLYDSILLSGILTVTDVSTKAPLSASMIQRYNEHQMDLAQLKQFIRQKLSDKYNEVFSDVSKDGYAGYIDGKTNQEAFYKYLKGLLNKIEGSGYFLDKIEREDFLRKQRTFDNGSIPHQIHLQEMRAIIRRQAEFYPFLADNQDRIEKILTFRIPYYVGPLARGKSDFAWLSRKSADKITPWNFDEIVDKESSAEAFINRMTNYDLYLPNQKVLPKHSLLYEKFTVYNELTKVKYKTEQGKTAFFDANMKQEIFDGVFKVYRKVTKDKLMDFLEKEFDEFRIVDLTGLDKENKAFNASYGTYHDLRKILDKDFLDNSKNEKILEDIVLTLTLFEDREMIRKRLENYSDLLTKEQVKKLERRHYTGWGRLSAELIHGIRNKESRKTILDYLIDDGNSNRNFMQLINDDALSFKEEIAKAQVIGETDNLNQVVSDIAGSPAIKKGILQSLKIVDELVKIMGHQPENIVVEMARENQFTNQGRRNSQQRLKGLTDSIKEFGSQILKEHPVEHSQLQNDRLFLYYLQNGRDMYTGEELDIDYLSQYDIDHIIPQAFIKDNSIDNRVLTSSKENRGKSDDVPSKNVVRKMKSYWSKLLSAKLITQRKFDNLTKAERGGLTDDDKAGFIKRQLVETRQITKHVARILDERFHTETDENNKKIRQVKIVTLKSNLVSNFRKEFELYKVREINDYHHAHDAYLNAVIGKALLGVYPQLEPEFVYGDYPHFHGHKENKATAKKFFYSNIMNFFKKDDVRTDKNGEIIWKKDEHISNIKKVLSYPQVNIVKKVEEQTGGFSKESILPKGNSDKLIPRKTKKFYWDTKKYGGFDSPIVAYSILVIADIEKGKSKKLKTVKALVGVTIMEKMTFERDPVAFLERKGYRNVQEENIIKLPKYSLFKLENGRKRLLASARELQKGNEIVLPNHLGTLLYHAKNIHKVDEPKHLDYVDKHKDEFKELLDVVSNFSKKYTLAEGNLEKIKELYAQNNGEDLKELASSFINLLTFTAIGAPATFKFFDKNIDRKRYTSTTEILNATLIHQSITGLYETRIDLSKLGGD

SEQ ID NO: 670 - protein, 1338 aa, Streptococcus mutans; identical to SEQ ID NO: 669

SEQ ID NO: 671 - protein, 1345 aa, Streptococcus mutans
MKKPYSIGLDIGTNSVGWAVVTDDYKVPAKKMKVLGNTDKSHIEKNLLGALLFDSGNTAEDRRLKRTARRRYTRRRNRILYLQEIFSEEMGKVDDSFFHRLEDFFLVTEDKRGERHPIFGNLEEEVKYHENFPTIYHLRQYLADNPEKVDLRLVYLALAHIIKFRGHFLIEGKFDTRNNDVQRLFQEFLAVYDNTFENSSLQEQNVQVEEILTDKISKSAKKDRVLKLFPNEKSNGRFAEFLKLIVGNQADFKKHFELEEKAPLQFSKDTYEEELEVLLAQIGDNYAELFLSAKKLYDSILLSGILTADDSSTKAPLSASMIQRYNEHQMDLAQLKQFIRQKLSDKYNEVFSDVSKDGYAGYIDGKTNQEAFYKYLKGLLNKIEGSGYFLDKIEREDFLRKQRTFDNGSIPHQIHLQEMRAIIRRQSEFYPFLADNQDRIEKILTFRIPYYVGPLARGKSDFAWLSRKSADKITPWNFDEIVDKESSAEAFINRMTNYDLYLPNQKVLPKHSLLYEKFTVYNELTKVKYKTEQGETAFFDANMKQEIFDGVFKVYRKVTKDKLMDFLEKEFDEFRIVDLTGLDKENKAFNASYGTYHDLRKILDKDFLDNSKNEKILEDIVLTLTLFEDREMIRKRLKNYSDLLTKEQLKKLERRHYTGWGRLSAELIHGIRNKESRKTILDYLIDDGNSNRNFMQLINDDALSFKEEIAKAQVIGETDNLNQVVSDIAGSPAIKKGILQSLKIVDELVKIMGHQPENIVVEMARENQFTNQGRRNSQQRLKGLTDSIKEFGSQILKEHPVENSQLQNDRLFLYYLQNGRDMYTGEELDIDYLSQYDIDHIIPQAFIKDNSIDNRVLTSSKENRGKSDDVPSKDVVRKMKPYWSKLLSAKLITQRKFDNLTKAERGGLTDDDKAGFIKRQLVETRQITKHVARILDERFNTETDENNKKIRQVKIVTLKSNLVSNFRKEFELYKVREINDYHHAHDAYLNAVIGKALLGVYPQLEPEFVYGDYPHFHGHEENKATAKKFFYSNIMNFFKKDDVRTDKNGEIIWKKDEHISNIKKVLSYPQVNIVKKVEEQTGGFSKESILPKGNSDKLIPRKTKKFYWDTKKYGGFDSPIVAYSILVIADIEKGKSKKLKTVKALVGVTIMEKMTFERDPVAFLERKGYRNVQEENIIKLPKYSLFKLENGRKRLLASARELQKGNEIVLPNHLGTLLYHAKNIHKVDEPKHLDYVDKHKDEFKELLDVVSNFSKKYTLAEGNLEKIKELYAQNNGEDLKELASSFINLLTFTAIGAPATFKFFDKNIDRKRYTSTTEILNATLIHQSITGLYETRIDLSKLGGD

SEQ ID NO: 672 - protein, 1345 aa, Streptococcus mutans; identical to SEQ ID NO: 671

SEQ ID NO: 673 - protein, 1229 aa, Streptococcus mutans
MKKPYSIGLDIGTNSVGWAVVTDDYKVPAKKMKVLGNTDKSHIEKNLLGALLFDSGNTAEDRRLKRTARRRYTRRRNRILYLQEIFSEEMGKVDDSFFHRLEDSFLVTEDKRGERHPIFGNLEEEVKYHENFPTIYHLRQYLADNPEKVDLRLVYLALAHIIKFRGHFLIEGKFDTRNNDVQRLFQEFLAVYDNTFENSSLQEQNIQVEEILTDKISKSAKKDRVLKLFPNEKSNGRFAEFLKLIVGNQADFKKHFELEEKAPLQFSKDTYEEELEVLLAQIGDNYAELFLSAKKLYDSILLSGILTVTDVGTKAPLSASMIQRYNEHQMDLTQLKQFIRQKLSDKYNEVFSDVSKDGYAGYIDGKTNQEAFYKYLKGLLNKIEGSGYFLDKIEREDFLRKQRTFDNGSIPHQIHLQEMRAIIRRQAEFYPFLADNQDRIEKILTFRIPYYVGPLARGKSDFAWLSRKSADKITPWNFDEIVDKESSAEAFINRMTNYDLYLPNQKVLPKHSLLYEKFTVYNELTKVKYKTEQGKTAFFDANMKQEIFDGVFKVYRKVTKDKLMDFLEKEFDEFRIVDLTGLDKENKVFNASYGTYHDLCKILDKDFLDNSKNEKILEDIVLTLTLFEDREMIRKRLENYSDLLTKEQVKKLERRHYTGWGRLSAELIHGIRNKESRKTILDYLIDDGNSNRNFMQLINDDALSFKEEIAKAQVIGETDNLNQVVSDIAGSPAIKKGILQSLKIVDELVKIMGHQPENIVVEMARENQFTNQGRRNSQQRLKGLTDSIKEFGSQILKEHPVENSQLQNDRLFLYYLQNGRDMYTGEELDIDYLSQYDIDHIIPQAFIKDNSIDNRVLTSSKENRGKSDDVPSKDVVRKMKPYWSKLLSAKLITQRKFDNLTKAERGGLTDDDKAGFIKRQLVETRQITKHVARILDERFNTETDENNKKIRQVKIVTLKSNLVSNFRKEFELYKVREINDYHHAHDAYLNAVIGKALLGVYPQLEPEFVYGDYPHFHGHEENKATAKKFFYSNIMNFFKKDDVRTDKNGEIIWKKDEHISNIKKVLSYPQVNIVKKVEEQTIGQNGGLFDDNPKSPLEVIPSKLVPLKKALNPEKYGGYQKPTTAYPILLIVDTKQLIPISVMDKKRFEQNPVKFLKDKGYQQIEKNNFVKLPKYTLVDIGNGIKRLWASSKEVHKGNQLVVSKKSQDLLYHAHHLDNDYSNEYVKNHY

SEQ ID NO: 674 - protein, 1229 aa, Streptococcus mutans; identical to SEQ ID NO: 673

SEQ ID NO: 675 - protein, 1345 aa, Streptococcus mutans
MKKPYSIGLDIGTNSVGWAVVTDDYKVPAKKMKVLGNTDKSHIEKNLLGALLFDSGNTAEDRRLKRTARRRYTRRRNRILYLQEIFSEEMGKVDDSFFHRLEDSFLVTEDKRGERHPIFGNLEEEVKYHENFPTIYHLRQYLADNPEKVDLRLVYLALAHIIKFRGHFLIEGKFDTRNNDVQRLFQEFLAVYDNTFENSSLQEQNVQVEEILTDKISKSAKKDRVLKLFPNEKSNGRFAEFLKLIVGNQADFKKHFELEEKAPLQFSKDTYEEELEVLLAQIGDNYAELFLSAKKLYDSILLSGILTVTDVGTKAPLSASMIQRYNEHQMDLAQLKQFIRQKLSDKYNEVFSDVSKDGYAGYIDGKTNQEAFYKYLKGLLNKIEGSGYFLDKIEREDFLRKQRTFDNGSIPHQIHLQEMRAIIRRQAEFYPFLADNQDRIEKLLTFRIPYYVGPLARGKSDFAWLSRKSADKITPWNFDEIVDKESSAEAFINRMTNYDLYLPNQKVLPKHSLLYEKFTVYNELIKVKYKTEQGKTAFFDANMKQEIFDGVFKVYRKVTKDKLMDFLEKEFDEFRIVDLTGLDKENKVFNASYGTYHDLCKILDKDFLDNSKNEKILEDIVLTLTLFEDREMIRKRLENYSDLLTKEQVKKLERRHYTGWGRLSAELIHGIRNKESRKTILDYLIDDGNSNRNFMQLINDDALSFKEEIAKAQVIGETDNLNQVVSDIAGSPAIKKGILQSLKIVDELVKIMGHQPENIVVEMARENQFTNQGRRNSQQRLKGLTDSIKEFGSQILKEHPVENSQLQNDRLFLYYLQNGRDMYTGEELDIDYLSQYDIDHIIPQAFIKDNSIDNRVLTSSKENRGKSDDVPSKDVVRKMKSYWSKLLSAKLITQRKFDNLTKAERGGLTDDDKAGFIKRQLVETRQITKHVARILDERFNTETDENNKKIRQVKIVTLKSNLVSNFRKEFELYKVREINDYHHAHDAYLNAVIGKALLGVYPQLEPEFVYGDYPHFHGHKENKATAKKFFYSNIMNFFKKDDVRTDKNGEIIWKKDEHISNIKKVLSYPQVNIVKKVEEQTGGFSKESILPKGNSDKLIPRKTKKFYWDTKKYGGFDSPIVAYSILVIADIEKGKSKKLKTVKALVGVTIMEKMTFERDPVAFLERKGYRNVQEENIIKLPKYSLFKLENGRKRLLASARELQKGNEIVLPNHLGTLLYHAKNIHKVDEPKHLDYVDKHKDEFKELLDVVSNFSKKYTLAEGNLEKIKELYAQNNGEDLKELASSFINLLTFTAIGAPATFKFFDKNIDRKRYTSTTEILNATLIHQSITGLYETRIDLNKLGGD

SEQ ID NO: 676 - protein, 1350 aa, Streptococcus mutans
MKKPYSIGLDIGTNSVGWAVVTDDYKVPAKKMKVLGNTDKSHIEKNLLGALLFDSGNTAEDRRLKRTARRRYTRRRNRILYLQEIFSEEMGKVDDSFFHRLEDSFLVTEDKRGERHPIFGNLEEEVKYHENFPTIYHLRQYLADNPEKVDLRLVYLALAHIIKFRGHFLIEGKFDTRNNDVQRLFQEFLAVYDNTFENSSLQEQNVQVEEILTDKISKSAKKDRVLKLFPNEKSNGRFAEFLKLIVGNQADFKKHFELEEKAPLQFSKDTYEEELEVLLAQIGDNYAELFLSAKKLYDSILLSGILTVTDVSTKAPLSASMIQRYNEHQMDLTQLKQFIRQKLSDKYNEVFSDVSKDGYAGYIDGKTNQEAFYKYLKGLLNKIEGSGYFLDKIEREDFLRKQRTFDNGSIPHQIHLQEMRAIIRRQAEFYSFLADNQDRIEKILTFRIPYYVGPLARGKSDFAWLSRKSADKITPWNFDEIVDKESSAEAFINRMTNYDLYLPNQKVLPKHSLLYEKFTVYNELTKVKYKTEQGKTAFFDANMKQEIFDGVFKVYRKVTKDKLMDFLEKEFDEFRIVDLTGLDKENKAFNASYGTYHDLRKILDKDFLDNSKNEKILEDIVLTLTLFEDREMIRKRLENYSDLLTKEQVKKLERRHYTGWGRLSAELIHGIRNKESRKTILDYLIDDGNSNRNFMQLINDDALSFKEEIAKAQVIGETDNLNQVVSDIAGSPAIKKGILQSLKIVDELVKIMGHQPENIVVEMARENQFTNQGRRNSQQRLKGLTDSIKEFGSQILKEHPVENSQLQNDRLFLYYLQNGRDMYTGEELDIDYLSQYDIDHIIPQAFIKDNSIDNRVLTSSKENRGKSDDVPSEDVVNRMRPFWNKLLSSGLISQRKYNNLTKKELTLDDKAGFIKRQLVETRQITKHVARMLDERFNKEFDDNNKRIRKVKIVTLKSNLVSSFRKEFELYKVREINDYHHAHDAYLNAVVVKALLVKYSKLEPEFVYGEYPKYNSYRERKTATQKMFFYSNIMNMFKSKVKLADDQIVERPMIEVNDETGEIAWDKTKHITTVKKVLSYPQVNIVKKVEEQTIGQNGGLFDDNPKSPLEVIPSKLVPLKKALNPEKYGGYQKPTTAYPILLIVDTKQLIPISVMDKKRFEQNPVKFLKDKGYQQIEKNNFVKLPKYTLVDIGNGIKRLWASSKEVHKGNQLVVSKKSQDLLYHAHHLDNDYSNEYVKNHYQQFDILFNEITSFSKKCKLGKEHIQKIEEAYSKERDSASIEELADGFIKLLGFTQLGATSPFSFLGIKLNQKQYTGKKDYLLPCMEATLIHQSITGLYETRIDLSKLGGD

SEQ ID NO: 677 - protein, 1350 aa, Streptococcus mutans
MKKPYSIGLDIGTNSVGWAVVTDDYKVPAKKMKVLGNTDKSHIEKNLLGALLFDSGNTAEDRRLKRTARRRYTRRRNRILYLQEIFSEEMGKVDDSFFHRLEDSFLVTEDKRGERHPIFGNLEEEVKYHENFPTIYHLRQYLADNPEKVDLRLVYLALAHIIKFRGHFLIEGKFDTRNNDVQRLFQEFLAVYDNTFENSSLQEQNVQVEEILTDKISKSAKKDRVLKLFPNEKSNGRFAEFLKLIVGNQADFKKHFELEEKAPLQFSKDTYEEELEVLLAQIGDNYAELFLSAKKLYDSILLSGILTVTDVSTKAPLSASMIQRYNEHQMDLTQLKQFIRQKLSDKYNEVFSDVSKDGYAGYIDGKTNQEAFYKYLKGLLNKIEGSGYFLDKIEREDFLRKQRTFDNGSIPHQIHLQEMRAIIRRQAEFYPFLADNQDRIEKILTFRIPYYVGPLARGKSDFAWLSRKSADKITPWNFDEIVDKESSAEAFINRMTNYDLYLPNQKVLPKHSLLYEKFTVYNELTKVKYKTEQGKTAFFDANMKQEIFDGVFKVYRKVTKDKLMDFLEKEFDEFRIVDLTGLDKENKAFNASYGTYHDLRKILDKDFLDNSKNEKILEDIVLTLTLFEDREMIRKRLKNYSDLLTKEQLKKLERRHYTGWGRLSAELIHGIRNKESRKTILDYLIDDGNSNRNFMQLINDDALSFKEEIAKAQVIGETDNLNQVVSDIAGSPAIKKGILQSLKIVDELVKIMGHQPENIVVEMARENQFTNQGRQNSQQRLKGLTDSIKEFGSQILKEHPVENSQLQNDRLFLYYLQNGRDMYTGEELDIDYLSQYDIDHIIPQAFIKDNSIDNRVLTSSKENRGKSDDVPSEDVVNRMRPFWNKLLSSGLISQRKYNNLTKKELTLDDKAGFIKRQLVETRQITKHVARMLDERFNKEFDDNNKRICKVKIVTLKSNLVSSFRKEFELYKVREINDYHHAHDAYLNAVVVKALLVKYSKLEPEFVYGEYPKYNSYRERKTATQKMFFYSNIMNMFKSKVKLADDQIVERPMIEVNDETGEIAWDKTKHITTVKKVLSYPQVNIVKKVEEQTIGQNGGLFDDNPKSPLEVIPSKLVPLKKALNPEKYGGYQKPTTAYPILLIVDTKQLIPISVMDKKRFEQNPVKFLKDKGYQQIEKNNFVKLPKYTLVDIGNGIKRLWASSKEVHKGNQLVVSKKSQDLLYHAHHLDNDYSNEYVKNHYQQFDILFNEITSFSKKCKLGKEHIQKIEEAYSKERDSASIEELADGFIKLLGFTQLGATSPFSFLGIKLNQKQYTGKKDYLLPCMEATLIHQSITGLYETRIDLSKLGGD

SEQ ID NO: 678 - protein, 1345 aa, Streptococcus mutans; identical to SEQ ID NO: 675

SEQ ID NO: 679 - protein, 1350 aa, Streptococcus mutans; identical to SEQ ID NO: 676

SEQ ID NO: 680 - protein, 1350 aa, Streptococcus mutans; identical to SEQ ID NO: 677

SEQ ID NO: 681 - protein, 1345 aa, Streptococcus mutans
MKKPYSIGLDIGTNSVGWAVVTDDYKVPAKKMKVLGNTDKSHIKKNLLGALLFDSGNTAADRRLKRTARRRYTRRRNRILYLQEIFAEEMSKVDDSFFHRLEDSFLVTEDKRGERHPIFGNLEEEVKYHENFPTIYHLRQYLADNPEKVDLRLVYLALAHIIKFRGHFLIEGKFDTRNNDVQRLFQEFLAVYDNTFENSSLQEQNVQVEEILTDKISKSAKKDRVLKLFPNEKSNGRFAEFLKLIVGNQADFKKHFELEEKAPLQFSKDTYEEELEVLLTQIGDNYAELFLSAKKLYDSILLSGILTVTDVSTKAPLSASMIQRYNEHQMDLAQLKQFIRQKLSDKYNEVFSDVSKDGYAGYIDGKTNQEAFYKYLKGLLNKIEGSGYFLDKIEREDFLRKQRTFDNGSIPHQIHLQEMRAIIRRQAEFYPFLADNQDRIEKILTFRIPYYVGPLARGKSDFAWLSRKSADKITPWNFDEIVDKESSAEAFINRMTNYDLYLPNQKVLPKHSLLYEKFTVYNELTKVKYKTEQGKTAFFDANMKQEIFDGVFKVYRKVTKDKLMDFLEKEFDEFRIVDLTGLDKENKAFNASYGTYHDLRKILDKDFLDNSKNEKILEDIVLTLTLFEDREMIRKRLENYSDLLTKEQVKKLERRHYTGWGRLSAELIHGIRNKESRKTLLDYLIDDGNSNRNFMQLINDDALSFKEEIAKAQVIGETDNLNQVVSDIAGSPAIKKGILQSLKIVDELVKIMGHQPENIVVEMARENQFTNQGRRNSQQRLKGLTDSIKEFGSQILKEHPVENSQLQNDRLFLYYLQNGRDMYTGEELDIDYLSQYDIDHIIPQAFIKDNSIDNRVLTSSKENRGKSDDVPSKDVVRKMKPYWSKLLSAKLITQRKFDNLTKAERGGLTDDDKAGFIKRQLVETRQITKHVARILDERFNTETDENNKKIRQVKIVTLKSNLVSNFRKEFELYKVREINDYHHAHDAYLNAVIGKALLGVYPQLEPEFVYGDYPHFHGHEENKATAKKFFYSNIMNFFKKDDVRTDKNGEIIWKKDEHISNIKKVLSYPQVNIVKKVEEQTGGFSKESILPKGNSDKLIPRKTKKFYWDTKKYGGFDSPIVAYSILVIADIEKGKSKKLKTVKALVGVTIMEKMTFERDPVAFLERKGYRNVQEENIIKLPKYSLFKLENGRKRLLASARELQKGNEIVLPNHLGTLLYHAKNIHKVDEPKHLDYVDKHKDEFKELLDVVSNFSKKYTLAEGNLEKIKELYAQNNGEDLKELSSSFINLLTFTAIGAPAAFKFFDKNIDRKRYTSTTEILNATLIHQSITGLYETRIDLSKLGGD

SEQ ID NO: 682 - protein, 1345 aa, Streptococcus mutans
MKKPYSIGLDIGTNSVGWAVVTDDYKVPAKKMKVLGNTDKSHIKKNLLGALLFDSGNTAADRRLKRTARRRYTRRRNRILYLQEIFAEEMSKVDDSFFHRLEDSFLVTEDKRGERHPIFGNLEEEVKYHENFPTIYHLRQYLADNPEKVDLRLVYLALAHIIKFRGHFLIEGKFDTRNNDVQRLFQEFLAVYDNTFENSSLQEQNVQVEEILTDKISKSAKKDRVLKLFPNEKSNGRFAEFLKLIVGNQADFKKHFELEEKAPLQFSKDTYEEELEVLLAQIGDNYAELFLSAKKLYDSILLSGILTVTDVSTKAPLSASMIQRYNEHQMDLAQLKQFIRQKLSDKYNEVFSDVSKDGYAGYIDGKTNQEAFYKYLKGLLNKIEGSGYFLDKIEREDFLRKQRTFDNGSIPHQIHLQEMRAIIRRQAEFYPFLADNQDRIEKILTFRIPYYVGPLARGKSDFAWLSRKSADKITPWNFDEIVDKESSAEAFINRMTNYDLYLPNQKVLPKHSLLYEKFTVYNELTKVKYKTEQGKTAFFDANMKQEIFDGVFKVYRKVTKDKLMDFLEKEFDEFRIVDLTGLDKENKAFNASYGTYHDLRKILDKDFLDNSKNEKILEDIVLTLTLFEDREMIRKRLENYSDLLTKEQVKKLERRHYTGWGRLSAELIHGIRNKESRKTILDYLIDDGNSNRNFMQLINDDALSFKEEIAKAQVIGETDNLNQVVSDIAGSPAIKKGILQSLKIVDELVKIMGHQPENIVVEMARENQFTNQGRRNSQQRLKGLTDSIKEFGSQILKEHPVEHSQLQNDRLFLYYLQNGRDMYTGEELDIDYLSQYDIDHIIPQAFIKDNSIDNRVLTSSKENRGKSDDVPSKNVVRKMKSYWSKLLSAKLITQRKFDNLTKAERGGLTDDDKAGFIKRQLVETRQITKHVARILDERFHTETDENNKKIRQVKIVTLKSNLVSNFRKEFELYKVREINDYHHAHDAYLNAVIGKALLGVYPQLEPEFVYGDYPHFHGHKENKATAKKFFYSNIMNFFKKDDVRTDKNGEIIWKKDEHISNIKKVLSYPQVNIVKKVEEQTGGFSKESILPKGNSDKLIPRKTKKFYWDTKKYGGFDSPIVAYSILVIADIEKGKSKKLKTVKALVGVTIMEKMTFERDPVAFLERKGYRNVQEENIIKLPKYSLFKLENGRKRLLASARELQKGNEIVLPNHLGTLLYHAKNIHKVDEPKHLDYVDKHKDEFKELLDVVSNFSKKYTLAEGNLEKIKELYAQNNGEDLKELASSFINLLTFTAIGAPATFKFFDKNIDRKRYTSTTEILNATLIHQSITGLYETRIDLSKLGGD

SEQ ID NO: 683 - protein, 1345 aa, Streptococcus mutans
MKKPYSIGLDIGTNSVGWAVVTDDYKVPAKKMKVLGNTDKSHIKKNLLGALLFDSGNTAADRRLKRTARRRYTRRRNRILYLQEIFAEEMSKVDDSFFHRLEDSFLVTEDKRGERHPIFGNLEEEVKYHENFPTIYHLRQYLADNPEKVDLRLVYLALAHIIKFRGHFLIEGKFDTRNNDVQRLFQEFLAVYDNTFENSSLQEQNVQVEEILTDKISKSAKKDRVLKLFPNEKSNGRFAEFLKLIVGNQADFKKHFELEEKAPLQFSKDTYEEELEVLLAQIGDNYAELFLSAKKLYDSILLSGILTVTDVSTKAPLSASMIQRYNEHQMDLAQLKQFIRQKLSDKYNEVFSDVSKDGYAGYIDGKTNQEAFYKYLKGLLNKIEGSGYFLDKIEREDFLRKQRTFDNGSIPHQIHLQEMRAIIRRQAEFYPFLADNQDRIEKILTFRIPYYVGPLARGKSDFAWLSRKSADKITPWNFDEIVDKESSAEAFINRMTNYDLYLPNQKVLPKHSLLYEKFTVYNELTKVKYKTEQGKTAFFDANMKQEIFDGVFKVYRKVTKDKLMDFLEKEFDEFRIVDLTGLDKENKVFNASYGTYHDLCKILDKDFLDNSKNEKILEDIVLTLTLFEDREMIRKRLENYSDLLTKEQVKKLERRHYTGWGRLSAELIHGIRNKESRKTILDYLIDDGNSNRNFMQLINDDALSFKEEIAKAQVIGETDNLNQVVSDIAGSPAIKKGILQSLKIVDELVKIMGHQPENIVVEMARENQFTKQGRRNSQQRLKGLTDSIKEFGSQILKEHPVENSQLQNDRLFLYYLQNGRDMYTGEELDIDYLSQYDIDHIIPQAFIKDNSIDNRVLTSSKENRGKSDDVPSKDVVRKMKSYWSKLLSAKLITQRKFDNLTKAERGGLTDDDKAGFIKRQLVETRQITKHVARILDERFYTETDENNKKIRQVKIVTLKSNLVSNFRKEFELYKVREINDYHHAHDAYLNAVIGKALLGVYPQLEPEFVYGDYPHFHGHKENKATAKKFFYSNIMNFFKKDDVRTDKNGEIIWKKDEHISNIKKVLSYPQVNIVKKVEEQTGGFSKESILPKGNSDKLIPRKTKKFYWDTKKYGGFDSPIVAYSILVIADIEKGKSKKLKTVKALVGVTIMEKMTFERDPVAFLERKGYRNVQEENIIKLPKYSLFKLENGRKRLLASARELQKGNEIVLPNHLGTLLYHAKNIHKVDEPKHLDYVDKHKDEFKELLDVVSNFSKKYTLAEGNLEKIKELYAQNNGEDLKELASSFINLLTFTAIGAPATFKFFDKNIDRKRYTSTTEILNATLIHQSITGLYETRIDLSKLGGD

SEQ ID NO: 684 - protein, 1345 aa, Streptococcus mutans
MKKPYSIGLDIGTNSVGWAVVTDDYKVPAKKMKVLGNTDKSHIKKNLLGALLFDSGNTAADRRLKRTARRRYTRRRNRILYLQEIFAEEMSKVDDSFFHRLEDSFLVTEDKRGERHPIFGNLEEEVKYHENFPTIYHLRQYLADNPEKVDLRLVYLALAHIIKFRGHFLIEGKFDTRNNDVQRLFQEFLAVYDNTFENSSLQEQNVQVEEILTDKISKSAKKDRVLKLFPNEKSNGRFAEFLKLIVGNQADFKKHFELEEKAPLQFSKDTYEEELEVLLAQIGDNYAELFLSAKKLYDSILLSGILTVTDVSTKAPLSASMIQRYNEHQMDLAQLKQFIRQKLSDKYNEVFSDVSKDGYAGYIDGKTNQEAFYKYLKGLLNKIEGSGYFLDKIEREDFLRKQRTFDNGSIPHQIHLQEMRAIIRRQAEFYPFLADNQDRIEKILTFRIPYYVGPLARGKSDFAWLSRKSADKITPWNFDEIVDKESSAEAFINRMTNYDLYLPNQKVLPKHSLLYEKFTVYNELTKVKYKTEQGKTAFFDANMKQEIFDGVFKVYRKVTKDKLMDFLEKEFDEFRIVDLTGLDKENKAFNASYGTYHDLRKILDKDFLDNSKNEKILEDIVLTLTLFEDREMIRKRLENYSDLLTKEQVKKLERRHYTGWGRLSAELIHGIRNKESRKTILDYLIDDGNSNRNFMQLINDDALSFKEEIAKAQVIGETDNLNQVVSDIAGSPAIKKGILQSLKIVDELVKIMGHQPENIVVEMARENQFTNQGRRNSQQRLKGLTDSIKEFGSQILKEHPVENSQLQNDRLFLYYLQNGRDMYTGEELDIDYLSQYDIDHIIPQAFIKDNSIDNRVLTSSKENRGKSDDVPSKNVVRKMKSYWSKLLSAKLITQRKFDNLTKAERGGLTDDDKAGFIKRQLVETRQITKHVARILDERFHTETDENNKKIRQVKIVTLKSNLVSNFRKEFELYKVREINDYHHAHDAYLNAVIGKALLGVYPQLEPEFVYGDYPHFHGHKENKATAKKFFYSNIMNFFKKDDVRTDKNGEIIWKKDEHISNIKKVLSYPQVNIVKKVEEQTGGFSKESILPKGNSDKLIPRKTKKFYWDTKKYGGFDSPIVAYSILVIADIEKGKSKKLKTVKALVGVTIMEKMTFERDPVAFLERKGYRNVQEENIIKLPKYSLFKLENGRKRLLASARELQKGNEIVLPNHLGTLLYHAKNIHKVDEPKHLDYVDKHKDEFKELLDVVSNFSKKYTLAEGNLEKIKELYAQNNGEDLKELSSSFINLLTFTAIGAPAAFKFFDKNIDRKRYTSTTEILNATLIHQSITGLYETRIDLSKLGGD

SEQ ID NO: 685 - protein, 1345 aa, Streptococcus mutans; identical to SEQ ID NO: 681

SEQ ID NO: 686 - protein, 1345 aa, Streptococcus mutans; identical to SEQ ID NO: 682

SEQ ID NO: 687 - protein, 1345 aa, Streptococcus mutans; identical to SEQ ID NO: 683

SEQ ID NO: 688 - protein, 1345 aa, Streptococcus mutans; identical to SEQ ID NO: 684

SEQ ID NO: 689 - protein, 1345 aa, Streptococcus mutans; identical to SEQ ID NO: 682

SEQ ID NO: 690 - protein, 1345 aa, Streptococcus mutans; identical to SEQ ID NO: 682

SEQ ID NO: 691 - protein, 1345 aa, Streptococcus mutans; identical to SEQ ID NO: 682

SEQ ID NO: 692 - protein, 1345 aa, Streptococcus mutans; identical to SEQ ID NO: 682

SEQ ID NO: 693 - protein, 1359 aa, Streptococcus mutans
MKKPYSIGLDIGTNSVGWAVVTDDYKVPAKKMKVLGNTDKSHIKKNLLGALLFDSGNTAEDRRLKRTARRRYTRRRNRILYLQEIFAEEMMQVDESFFQRLDDSFLVEEDKRGSRYPIFGTLKEEKKYHKEFKTIYHLREKLANSTEKADLRLVYLSLAHMIKFRGHFLIEGQLKAENTNVQALFKDFVEVYDKTVEESHLSEMTVDALSILTEKVSKSRRLENLVECYPTEKKNTLFGNLIALSLGLQPNFKTNFQLSEDAKLQFSKDTYEEDLEGLLGEIGDEYADLFASAKNLYDAILLSGILAVDDNTTKAPLSASMVKRYKEHKEELAAFKRFIKEKLPKKYEEIFKDDTKNGYAGYVGADKKLRKRSGKLATEEEFYKYVKGILNKVEGADVWLDKIDREDFLRKQRTFDNGSIPHQIHLQEMHAILRRQGEHYPFLKENQDKIEKILTFRIPYYVGPLVRKGSRFAWAEYKADEKITPWNFDDILDKEKSAEKFITRMTLNDLYLPEEKVLPKHSLLYETFTVYNELTKVKYVNEQGEAKFFDANMKQEIFDHVFKENRKVTKDKLLNYLNKEFEEFRIVNLTGLDKENKVFNSSLGTYHDLRKILNKSFLDNKENEQIIEDIIQTLTLFEDREMIRQRLQKYSDIFTKAQLKKLERRHYTGWGRLSYKLINGIRDKQSNKTILGYLIDDGYSNRNFMQLINDDALSFKEEIAKAQVIGEMDGLNQVVSDIAGSPAIKKGILQSLKIVDELVKVMGHNPANIVIEMARENQTTAKGRRSSQKRYKRLEEAIKNLDHDLNHKILKEHPTDNQALQNDRLFLYYLQNGRDMYTEDPLDINRLSDYDIDHIIPQAFIKDNSIDNRVLTRSDKNRGKSDDVPSEEVVHKMKPFWSKLLSAKLITQRKFDNLTKAERGGLTDDDKAGFIKRQLVETRQITKHVARILDERFNTETDENNKKIRQVKIVTLKSNLVSNFRKEFELYKVREINDYHHAHDAYLNAVIGKALLGVYPQLEPEFVYGDYPHFHGHKENKATAKKFFYSNIMNFFKKGDVRTDKNGEIIWKKDEHISNIKKVLSYPQVNIVKKVEEQTGGFSKESILPKGNSDKLIPRKTKKFYWDTKKYGGFDSPIVAYSILVIADIEKGKSKKLKTVKALVGVTIMEKMTFERDPVAFLERKGYRNVQEENIIKLPKYSLFKLENGRKRLLASARELQKGNEIVLPNHLETLLYHAKNIHKVDEPKHLDYVDKHKDEFKELLDVVSNFSKKYTLAEGNLEKIKELYAQNNGEDLKELASSFINLLTFTAIGAPAAFKFFDKNIDRKRYTSTTEILNATLIHQSITGLYETRIDLNKLGGD

SEQ ID NO: 694 - protein, 1359 aa, Streptococcus mutans; identical to SEQ ID NO: 693

SEQ ID NO: 695 - protein, 1355 aa, Streptococcus mutans
MKKPYSIGLDIGTNSVGWAVVTDDYKVPAKKMKVLGNTDKSHIKKNLLGALLFDSGNTAEDRRLKRTARRRYTRRRNRILYLQEIFAEEMSKVDDSFFHRLDESFLTDDDKNFDSHPIFGNKAEEDAYHQKFPTIYHLRKHLADSTEKADLRLVYLALAHMIKFRGHFLIEGELNAENTDVQKLFADFVGVYDRTFDDSHLSEITVDASSILTEKISKSRRLEKLINNYPKEKKNTLFGNLIALSLGLQPNFKTNFKLSEDAKLQFSKDTYEEDLEELLGKIGDDYADLFTLAKNLYDAILLSGILTADDSSTKAPLSASMIKRYAEHHEDLEKLKEFIKANKPELYHDIFKDETKNGYAGYIENGVKQDEFYKYLKNTLSKITGSDYFLDQIEREDFLRKQRTFDNGSIPHQIHLQEMHAILRRQGDYYPFLKENQDRIEKILTFRIPYYVGPLARKNSRFAWAEYHSDEAVTPWNFDQVIDKESSAQAFIEHMTNNDLYLPNEKVLPKHSPLYEKYTVYNELTKIKYVTEIGEAKFFDANLKQEIFDGLFKHERKVTKKKLRTFLDKNFDEFRIVDIQGLDKETETFNASYATYQDLLKVIKDKVFMDNPENAEILENIVLTLTLFEDREMIKQRLAKYADVFDKKVIDQLARRHYTGWGRLSAKLLNGIRDKQSCKTIMDYLIDDAQSNRNLMQLITDDNLTFKDDIVKAQYVDNSDDLHQVVQSLAGSPAIKKGILQSLKIVDELVKVMGKEPEQIVVEMARENQTTAKGRRNSQQRYKRLKEAIKSLDRDLNHKILKEHPTDNQALQNNRLFLYYLQNGRDMYTGESLDINRLSDYDIDHVIPQAFIKDNSIDNRVLTSSKANRGKSDDVPSEDVVNRMRPFWNKLLSSGLISQRKYNNLTKKELTLDDKAGFIKRQLVETRQITKHVARMLDERFNKEFDDNNKRIRRVKIVTLKSNLVSSFRKEFELYKVREINDYHHAHDAYLNAVVVKALLVKYPKLEPEFVYGEYPKYNSYRERKTATQKMFFYSNIMNMFKSKVKLADDQIVERPMIEVNDETGEIAWDKTKHITTVKKVLSYPQVNIVKKVEEQTIGQNGGLFDDNPKSPLEVIPSKLVPLKKALNPEKYGGYQKPTTAYPILLIVDTKQLIPISVMDKKRFEQNPVKFLKDKGYQQIEKNNFVKLPKYTLVDIGNGIKRLWASSKEVHKGNQLVVSKKSQDLLYHAHHLDNDYSNEYVKNHYQQFDILFNEITSFSKKCKLGKEHIQKIEEAYSKERDFASIEELADGFIKLLGFTQLGATSPFSFLGIKLNQKQYTGKKDYLLPCMEATLIHQSITGLYETRIDLSKLGGD

SEQ ID NO: 696 - protein, 1355 aa, Streptococcus mutans; identical to SEQ ID NO: 695

SEQ ID NO: 697 - protein, 1345 aa, Streptococcus mutans
MKKPYSIGLDIGTNSVGWAVVTDDYKVPAKKMKVLGNTDKSHIKKNLLGALLFDSGNTAEDRRLKRTARRRYTRRRNRILYLQEIFSEEMDKVDDSFFHRLEDSFLVTEDKRGERHPIFGNLEEEVKYHENFPTIYHLRQYLADNPEKVDLRLVYLALAHIIKFRGHFLIEGKFDTRNNDVQRLFQEFLAVYDNTFENSSLQEQNVQVEEILTDKISKSAKKDRVLKLFPNEKSNGRFAEFLKLIVGNQADFKKHFELEEKAPLQFSKDTYEEELEVLLAQIGDNYAELFLSAKKLYDSILLSGILTVTDVSTKAPLSASMIQRYNEHQMDLAQLKQFIRQKLSDKYNEVFSDVSKDGYAGYIDGKTNQEAFYKYLKGLLNKIEGSGYFLDKIEREDFLRKQRTFDNGSIPHQIHLQEMRAIIRRQAEFYPFLADNQDRIEKILTFRIPYYVGPLARGKSDFAWLSRKSADKITPWNFDEIVDKESSAEAFINRMTNYDLYLPNQKVLPKHSLLYEKFTVYNELTKVKYKTEQGKTAFFDANMKQEIFDGVFKVYRKVTKDKLMDFLEKEFDEFRIVDLTGLDKENKVFNASYGTYHDLCKILDKDFLDNSKNEKILEDIVLTLTLFEDREMIRKRLENYSDLLTKEQVKKLERRHYTGWGRLSAELIHGIRNKESRKTILDYLIDDGNSNRNFMQLINDDALSFKEEIAKAQVIGETDNLNQVVSDIAGSPAIKKGILQSLKIVDELVKIMGHQPENIVVEMARENQFTKQGRRNSQQRLKGLTDSIKEFGSQILKEHPVENSQLQNDRLFLYYLQNGRDMYTGEELDIDYLSQYDIDHIIPQAFIKDNSIDNRVLTSSKENRGKSDDVPSKDVVRKMKSYWSKLLSAKLITQRKFDNLTKAERGGLTDDDKAGFIKRQLVETRQITKHVARILDERFYTETDENNKKIRQVKIVTLKSNLVSNFRKEFELYKVREINDYHHAHDAYLNAVIGKALLGVYPQLEPEFVYGDYPHFHGHKENKATAKKFFYSNIMNFFKKDDVRTDKNGEIIWKKDEHISNIKKVLSYPQVNIVKKVEEQTGGFSKESILPKGNSDKLIPRKTKKFYWDTKKYGGFDSPIVAYSILVIADIEKGKSKKLKTVKALVGVTIMEKMTFERDPVAFLERKGYRNVQEENIIKLPKYSLFKLENGRKRLLASARELQKGNEIVLPNHLGTLLYHAKNIHKVDEPKHLDYVDKHKDEFKELLDVVSNFSKKYTLAEGNLEKIKELYAQNNGEDLKELASSFINLLTFTAIGAPATFKFFDKNIDRKRYTSTTEILNATLIHQSITGLYETRIDLSKLGGD

SEQ ID NO: 698 - protein, 1345 aa, Streptococcus mutans; identical to SEQ ID NO: 697

SEQ ID NO: 699 - protein, 1345 aa, Streptococcus mutans
MKKPYSIGLDIGTNSVGWAVVTDDYKVPAKKMKVLGNTDKSHIKKNLLGALLFDSGNTAEDRRLKRTARRRYTRRRNRILYLQEIFSEEMGKVDDSFFHRLDESFLTDDDKNFDSHPIFGNKAEEDAYHQKFPTIYHLRKHLADSTEKADLRLVYLALAHMIKFRGHFLIEGELNAENTDVQKLFADFVGVYDRTFDDSHLSEITVDASSILTEKISKSRRLEKLINNYPKEKKNTLFGNLIALSLGLQPNFKTNFKLSEDAKLQFSKDTYEEELEVLLAQIGDNYAELFLSAKKLYDSILLSGILTVTDVSTKAPLSASMIQRYNEHQMDLAQLKQFIRQKLSDKYNEVFSDVSKDGYAGYIDGKTNQEAFYKYLKGLLNKIEGSGYFLDKIEREDFLRKQRTFDNGSIPHQIHLQEMRAIIRRQAEFYPFLADNQDRIEKILTFRIPYYVGPLARGKSDFAWLSRKSADKITPWNFDEIVDKESSVEAFINRMTNYDLYLPNQKVLPKHSLLYEKFTVYNELTKVKYKTEQGKTAFFDANMKQEIFDGVFKVYRKVTKDKLMDFLEKEFDEFRIVDLTGLDKENKAFNASYGTYHDLRKILDKDFLDNSKNEKILEDIVLTLTLFEDREMIRKRLKNYSDLLTKEQLKKLERRHYTGWGRLSAELIHGIRNKESRKTILDYLIDDGNSNRNFMQLINDDALSFKEEIAKAQVIGETDNLNQVVSDIAGSPAIKKGILQSLKIVDELVKIMGHQPENIVVEMARENQFTNQGRRNSQQRLKGLTDSIKEFGSQILKEHPVENSQLQNDRLFLYYLQNGRDMYTGEELDIDYLSQYDIDHIIPQAFIKDNSIDNRVLTSSKENRGKSDDVPSKDVVRKMKSYWSKLLSAKLITQRKFDNLTKGERGGLTDDDKAGFIKRQLVETRQITKHVARILDERFNTETDENNKKIRQVKIVTLKSNLVSNFRKEFELYKVREINDYHHAHDAYLNAVIGKALLGVYPQLEPEFVYGDYPHFHGHKENKATAKKFFYSNIMNFFKKDDVRTDKNGEIIWKKDEYISNIKKVLSYPQVNIVKKVEEQTGGFSKESILPKGDSDKLIPRKTKKFYWDTKKYGGFDSPIVAYSILVIADIEKGKSKKLKTVKALVGVTIMEKMTFERDPVAFLERKGYRNVQEENIIKLPKYSLFKLENGRKRLLASARELQKGNEIVLPNHLGTLLYHAKNIHKVDEPKHLDYVDKHKDEFKELLDVVSNFSKKYTLAEGNLEKIKELYAQNNGEDLKELASSFINLLTFTAIGAPATFKFFDKNIDRKRYTSTTEILNATLIHQSITGLYETRIDLSKLGGD

SEQ ID NO: 700 - protein, 1345 aa, Streptococcus mutans
MKKPYSIGLDIGTNSVGWAVVTDDYKVPAKKMKVLGNTDKSHIKKNLLGALLFDSGNTAEDRRLKRTARRRYTRRRNRILYLQEIFSEEMGKVDDSFFHRLDESFLTDDDKNFDSYPIFGNKAEEDAYHQKFPTIYHLRKHLADSTEKADLRLVYLALAHMIKFRGHFLIEGELNAENTDVQKLFADFVGVYDRTFDDSHLSEITVDASSILTEKISKSRRLEKLINNYPKEKKNTLFRNLVALSLGLQPNFKTNFKLSEDAKLQFSKDTYEEDLEELLGKIGDDYADLFTLAKNLYDAILLSGILTADDSSTKAPLSASMIKRYAEHHEDLEKLKEFIKANKPELYHDIFKDETKNGYAGYIENGVKQDEFYKYLKNTLSKIAGSDYFLDKIEREDFLRKQRTFDNGSIPHQIHLQEMHAILRRQGDYYPFLKENQDRIEKILTFRIPYYVGPLARGKSDFAWLSRKSADKITPWNFDEIVDKESSVEAFINRMTNYDLYLPNQKVLPKHSLLYEKFTVYNELTKVKYKTEQGKTAFFDANMKQEIFDGVFKVYRKVTKDKLMDFLEKEFDEFRIVDLTGLDKENKAFNASYGTYHDLRKILDKDFLDNSKNEKILEDIVLTLTLFEDREMIRKRLKNYSDLLTKEQLKKLERRHYTGWGRLSAELIHGIRNKESRKTILDYLIDDGNSNRNFMQLINDDALSFKEEIAKAQVIGETDNLNQVVSDIAGSPAIKKGILQSLKIVDELVKIMGHQPENIVVEMARENQFTNQGRRNSQQRLKGLTDSIKEFGSQILKEHPVENSQLQNDRLFLYYLQNGRDMYTGEELDIDYLSQYDIDHIIPQAFIKDNSIDNRVLTSSKENRGKSDDVPSKDVVRKMKSYWSKLLSAKLITQRKFDNLTKGERGGLTDDDKAGFIKRQLVETRQITKHVARILDERFNTETDENNKKIRQVKIVTLKSNLVSNFRKEFELYKVREINDYHHAHDAYLNAVIGKALLGVYPQLEPEFVYGDYPHFHGHKENKATAKKFFYSNIMNFFKKDDVRTDKNGEIIWKKDEYISNIKKVLSYPQVNIVKKVEEQTGGFSKESILPKGDSDKLIPRKTKKFYWDTKKYGGFDSPIVAYSILVIADIEKGKSKKLKTVKALVGVTIMEKMTFERDPVAFLERKGYRNVQEENIIKLPKYSLFKLENGRKRLLASARELQKGNEIVLPNHLGTLLYHAKNIHKVDEPKHLDYVDKHKDEFKELLDVVSNFSKKYTLAEGNLEKIKELYAQNNGEDLKELASSFINLLTFTAIGAPATFKFFDKNIDRKRYTSTTEILNATLIHQSITGLYETRIDLSKLGGD

SEQ ID NO: 701 - protein, 1345 aa, Streptococcus mutans; identical to SEQ ID NO: 700

SEQ ID NO: 702 - protein, 1345 aa, Streptococcus mutans
MKKPYSIGLDIGTNSVGWAVVTDDYKVPAKKMKVLGNTDKSHIKKNLLGALLFDSGNTAEDRRLKRTARRRYTRRRNRILYLQEIFSEEMGKVDDSFFHRLEDSFLVTEDKRGERHPIFGNLEEEVKYHENFPTIYHLRQYLADNPEKTDLRLVYLALAHIIKFGGHFLIEGKFDTRNNDVQRLFQEFLAVYDNTFENSSLQEQNVQVEEILTDKISKSAKKDRVLKLFPNEKSNGRFAEFLKLIVGNQADFKKHFELEEKAPLQFSKDIYEEELEVLLAQIGDNYAELFLSAKKLYDSILLSGILTVTDVSTKAPLSASMIQRYNEHQMDLAQLKQFIRQKLSDKYNEVFSDVSKDGYAGYIDGKTNQEAFYKYLKGLLNKIEGSGYFLDKIEREDFLRKQRTFDNGSIPHQIHLQEMRAIIRRQAEFYPFLADNQDRIEKILTFRIPYYVGPLARGKSDFAWLSRKSADKITPWNFDEIVDKESSVEAFINRMTNYDLYLPNQKVLPKHSLLYEKFTVYNELTKVKYKTEQGKTAFFDANMKQEIFDGVFKVYRKVTKDKLMDFLEKEFDEFRIVDLTGLDKENKAFNASYGTYHDLRKILDKDFLDNSKNEKILEDIVLTLTLFEDREMIRKRLKNYSDLLTKEQLKKLERRHYTGWGRLSAELIHGIRNKESRKTILDYLIDDGNSNRNFMQLINDDALSFKEEIAKAQVIGETDNLNQVVSDIAGSPAIKKGILQSLKIVDELVKIMGHQPENIVVEMARENQFTNQGRRNSQQRLKGLTDSIKEFGSQILKEHPVENSQLQNDRLFLYYLQNGRDMYTGEELDIDYLSQYDIDHIIPQAFIKDNSIDNRVLTSSKENRGKSDDVPSKNVVRKMKSYWSKLLSAKLITQRKFDNLTKAERGGLTDDDKAGFIKRQLVETRQITKHVARILDERFHTETDENNKKIRQVKIVTLKSNLVSNFRKEFELYKVREINDYHHAHDAYLNAVIGKALLGVYPQLEPEFVYGDYPHFHGHKENKATAKKFFYSNIMNFFKKDDVRTDKNGEIIWKKDEHISNIKKVLSYPQVNIVKKVEEQTGGFSKESILPKGNSDKLIPRKTKKFYWDTKKYGGFDSPIVAYSILVIADIEKGKSKKLKTVKALVGVTIMEKMTFERDPVAFLERKGYRNVQEENIIKLPKYSLFKLENGRKRLLASARELQKGNEIVLPNHLGTLLYHAKNIHKVDEPKHLDYVDKHKDEFKELLDVVSNFSKKYTLAEGNLEKIKELYAQNNGEDLKELASSFINLLTFTAIGAPATFKFFDKNIDRKRYTSTTEILNATLIHQSITGLYETRIDLSKLGGD

SEQ ID NO: 703 - protein, 1345 aa, Streptococcus mutans; identical to SEQ ID NO: 702

SEQ ID NO: 704 - protein, 1345 aa, Streptococcus mutans
MKKPYSIGLDIGTNSVGWAVVTDDYKVPAKKMKVLGNTDKSHIKKNLLGALLFDSGNTAEDRRLKRTARRRYTRRRNRILYLQEIFSEEMGKVDDSFFHRLEDSFLVTEDKRGERHPIFGNLEEEVKYHENFPTIYHLRQYLADNPEKTDLRLVYLALAHIIKFRGHFLIEGKFDTRNNDVQRLFQEFLAVYDNTFENSSLQEQNVQVEEILTDKISKSAKKDRVLKLFPNEKSNGRFAEFLKLIVGNQADFKKHFELEEKAPLQFSKDIYEEELEVLLAQIGDNYAELFLSAKKLYDSILLSGILTVTDVSTKAPLSASMIQRYNEHQMDLAQLKQFIRQKLSDKYNEVFSDVSKDGYAGYIDGKTNQEAFYKYLKGLLNKIEGSGYFLDKIEREDFLRKQRTFDNGSIPHQIHLQEMRAIIRRQAEFYPFLADNQDRIEKILTFRIPYYVGPLARGKSDFAWLSRKSADKITPWNFDEIVDKESSVEAFINRMTNYDLYLPNQKVLPKHSLLYEKFTVYNELTKVKYKTEQGKTAFFDANMKQEIFDGVFKVYRKVTKDKLMDFLEKEFDEFRIVDLTGLDKENKAFNASYGTYHDLRKILDKDFLDNSKNEKILEDIVLTLTLFEDREMIRKRLKNYSDLLTKEQLKKLERRHYTGWGRLSAELIHGIRNKESRKTILDYLIDDGNSNRNFMQLINDDALSFKEEIAKAQVIGETDNLNQVVSDIAGSPAIKKGILQSLKIVDELVKIMGHQPENIVVEMARENQFTNQGRRNSQQRLKGLTDSIKEFGSQILKEHPVENSQLQNDRLFLYYLQNGRDMYTGEELDIDYLSQYDIDHIIPQAFIKDNSIDNRVLTSSKENRGKSDDVPSKNVVRKMKSYWSKLLSAKLITQRKFDNLTKAERGGLTDDDKAGFIKRQLVETRQITKHVARILDERFHTETDENNKKIRQVKIVTLKSNLVSNFRKEFELYKVREINDYHHAHDAYLNAVIGKALLGVYPQLEPEFVYGDYPHFHGHKENKATAKKFFYSNIMNFFKKDDVRTDKNGEIIWKKDEHISNIKKVLSYPQVNIVKKVEEQTGGFSKESILPKGNSDKLIPRKTKKFYWDTKKYGGFDSPIVAYSILVIADIEKGKSKKLKTVKALVGVTIMEKMTFERDPVAFLERKGYRNVQEENIIKLPKYSLFKLENGRKRLLASARELQKGNEIVLPNHLGTLLYHAKNIHKVDEPKHLDYVDKHKDEFKELLDVVSNFSKKYTLAEGNLEKIKELYAQNNGEDLKELASSFINLLTFTAIGAPATFKFFDKNIDRKRYTSTTEILNATLIHQSITGLYETRIDLSKLGGD

SEQ ID NO: 705 - protein, 1345 aa, Streptococcus mutans
MKKPYSIGLDIGTNSVGWAVVTDDYKVPAKKMKVLGNTDKSHIKKNLLGALLFDSGNTAEDRRLKRTARRRYTRRRNRILYLQEIFSEEMGKVDDSFFHRLEDSFLVTEDKRGERHPIFGNLEEEVKYHENFPTIYHLRQYLADNPEKTDLRLVYLALAHIIKFRGHFLIEGKFDTRNNDVQRLFQEFLAVYDNTFENSSLQEQNVQVEEILTDKISKSAKKDRVLKLFPNEKSNGRFAEFLKLIVGNQADFKKHFELEEKAPLQFSKDIYEEELEVLLAQIGDNYAELFLSAKKLYDSILLSGILTVTDVSTKAPLSASMIQRYNEHQMDLAQLKQFIRQKLSDKYNEVFSDVSKDGYAGYIDGKTNQEAFYKYLKGLLNKIEGSGYFLDKIEREDFLRKQRTFDNGSIPHQIHLQEMRAIIRRQAEFYPFLADNQDRIEKILTFRIPYYVGPLARGKSDFAWLSRKSADKITPWNFDEIVDKESSVEAFINRMTNYDLYLPNQKVLPKHSLLYEKFTVYNELTKVKYKTEQGKTAFFDANMKQEIFDGVFKVYRKVTKDKLMDFLEKEFDEFRIVDLTGLDKENKAFNASYGTYHDLRKILDKDFLDNSKNEKILEDIVLTLTLFEDREMIRKRLKNYSDLLTKEQLKKLERRHYTGWGRLSAELIHGIRNKESRKTILDYLIDDGNSNRNFMQLINDDALSFKEEIAKAQVIGETDNLNQVVSDIAGSPAIKKGILQSLKIVDELVKIMGHQPENIVVEMARENQFTNQGRRNSQQRLKGLTDSIKEFGSQILKEHPVENSQLQNDRLFLYYLQNGRDMYTGEELDIDYLSQYDIDHIIPQAFIKDNSIDNRVLTSSKENRGKSDDVPSKDVVRKMKSYWSKLLSAKLITQRKFDNLTKAERGGLTDDDKAGFIKRQLVETRQITKHVARILDERFNTETDENNKKIRQVKIVTLKSNLVSNFRKEFELYKVREINDYHHAHDAYLNAVIGKALLGVYPQLEPEFVYGDYPHFHGHKENKATAKKFFYSNIMNFFKKDDVRTDKNGEIIWKKDEHISNIKKVLSYPQVNIVKKVEEQTGGFSKESILPKGNSYKLIPRKTKKFYWDTKKYGGFDSPIVAYSILVIADIEKGKSKKLKTVKALVGVTIMEKMTFERDPVAFLERKGYRNVQEENIIKLPKYSLFKLENGRKRLLASARELQKGNEIVLPNHLGTLLYHAKNIHKVDEPKHLDYVDKHKDEFKELLDVVSNFSKKYTLAEGNLEKIKELYAQNNGEDLKELASSFINLLTFTAIGAPAAFKFFDKNIDRKRYTSTTEILNATLIHQSITGLYETRIDLSKLGGD

SEQ ID NO: 706 - protein, 1345 aa, Streptococcus mutans
MKKPYSIGLDIGTNSVGWAVVTDDYKVPAKKMKVLGNTDKSHIKKNLLGALLFDSGNTAEDRRLKRTARRRYTRRRNRILYLQEIFSEEMGKVDDSFFHRLEDSFLVTEDKRGERHPIFGNLEEEVKYHENFPTIYHLRQYLADNPEKTDLRLVYLALAHIIKFRGHFLIEGKFDTRNNDVQRLFQEFLAVYDNTFENSSLQEQNVQVEEILTDKISKSAKKDRVLKLFPNEKSNGRFAEFLKLIVGNQADFKKHFELEEKAPLQFSKDIYEEELEVLLAQIGDNYAELFLSAKKLYDSILLSGILTVTDVSTKAPLSASMIQRYNEHQMDLAQLKQFIRQKLSDKYNEVFSDVSKDGYAGYIDGKTNQEAFYKYLKGLLNKIEGSGYFLDKIEREDFLRKQRTFDNGSIPHQIHLQEMRAIIRRQAEFYPFLADNQDRIEKILTFRIPYYVGPLARGKSDFAWLSRKSADKITPWNFDEIVDKESSAEAFINRMTNYDLYLPNQKVLPKHSLLYEKFTVYNELTKVKYKTEQGKTAFFDANMKQEIFDGVFKVYRKVTKDKLMDFLEKEFDEFRIVDLTGLDKENKAFNASYGTYHDLRKILDKDFLDNSKNEKILEDIVLTLTLFEDREMIRKRLKNYSDLLTKEQLKKLERRHYTGWGRLSAELIHGIRNKESRKTILDYLIDDGNSNRNFMQLINDDALSFKEEIAKAQVIGETDNLNQVVSDIAGSLAIKKGILQSLKIVDELVKIMGHQPENIVVEMARENQFTNQGRRNSQQRLKGLTDSIKEFGSQILKEHPVENSQLQNDRLFLYYLQNGRDMYTGEELDIDYLSQYDIDHIIPQAFIKDNSIDNRVLTSSKENRGKSDDVPSKDVVRKMKSYWSKLLSAKLITQRKFDNLTKGERGGLTDDDKAGFIKRQLVETRQITKHVARILDERFNTETDENNKKIRQVKIVTLKSNLVSNFRKEFELYKVREINDYHHAHDAYLNAVIGKALLGVYPQLEPEFVYGDYPHFHGHKENKATAKKFFYSNIMNFFKKDDVRTDKNGEIIWKKDEYISNIKKVLSYPQVNIVKKVEEQTGGFFKESILPKGDSDKLIPRKTKKFYWDTKKYGGFDSPIVAYSILVIADIEKGKSKKLKTVKALVGVTIMEKMTFERDPVAFLERKGYRNVQEENIIKLPKYSLFKLENGRKRLLASARELQKGNEIVLPNHLGTLLYHAKNIHKVDEPKHLDYVDKHKDEFKELLDVVSNFSKKYTLAEGNLEKIKELYAQNNGEDLKELASSFINLLTFTAIGAPATFKFFDKNIDRKRYTSTTEILNATLIHQSITGLYETRIDLSKLGGD

SEQ ID NO: 707 - protein, 1345 aa, Streptococcus mutans
MKKPYSIGLDIGTNSVGWAVVTDDYKVPAKKMKVLGNTDKSHIKKNLLGALLFDSGNTAEDRRLKRTARRRYTRRRNRILYLQEIFSEEMGKVDDSFFHRLEDSFLVTEDKRGERHPIFGNLEEEVKYHENFPTIYHLRQYLADNPEKTDLRLVYLALAHIIKFRGHFLIEGKFDTRNNDVQRLFQEFLAVYDNTFENSSLQEQNVQVEEILTDKISKSAKKDRVLKLFPNEKSNGRFAEFLKLIVGNQADFKKHFELEEKAPLQFSKDIYEEELEVLLAQIGDNYAELFLSAKKLYDSILLSGILTVTDVSTKAPLSASMIQRYNEHQMDLAQLKQFIRQKLSDKYNEVFSDVSKDGYAGYIDGKTNQEAFYKYLKGLLNKIEGSGYFLDKIEREDFLRKQRTFDNGSIPHQIHLQEMRAIIRRQAEFYPFLADNQDRIEKILTFRIPYYVGPLARGKSDFAWLSRKSADKITPWNFDEIVDKESSVEAFINRMTNYDLYLPNQKVLPKHSLLYEKFTVYNELTKVKYKTEQGKTAFFDANMKQEIFDGVFKVYRKVTKDKLMDFLEKEFDEFRIVDLTGLDKENKAFNASYGTYHDLRKILDKDFLDNSKNEKILEDIVLTLTLFEDREMIRKRLKNYSDLLTKEQLKKLERRHYTGWGRLSAELIHGIRNKESRKTILDYLIDDGNSNRNFMQLINDDALSFKEEIAKAQVIGETDNLNQVVSDIAGSPAIKKGILQSLKIVDELVKIMGHQPENIVVEMARENQFTNQGRRNSQQRLKGLTDSIKEFGSQILKEHPVENSQLQNDRLFLYYLQNGRDMYTGEELDIDYLSQYDIDHIIPQAFIKDNSIDNRVLTSSKENRGKSDDVPSKDVVRKMKSYWSKLLSAKLITQRKFDNLTKAERGGLTDDDKAGFIKRQLVETRQITKHVARILDERFNTETDENNKKIRQVKIVTLKSNLVSNFRKEFELYKVREINDYHHAHDAYLNAVIGKALLGVYPQLEPEFVYGDYPHFHGHKENKATAKKFFYSNIMNFFKKDDVRTDKNGEIIWKKDEHISNIKKVLSYPQVNIVKKVEEQTGGFSKESILPKGNSDKLIPRKTKKFYWDTKKYGGFDSPIVAYSILVIADIEKGKSKKLKTVKALVGVTIMEKMTFERDPVAFLERKGYRNVQEENIIKLPKYSLFKLENGRKRLLASARELQKGNEIVLPNHLGTLLYHAKNIHKVDEPKHLDYVDKHKDEFKELLDVVSNFSKKYTLAEGNLEKIKELYAQNNGEDLKELASSFINLLTFTAIGAPATFKFFDKNIDRKRYTSTTEILNATLIHQSITGLYETRIDLNKLGGD

SEQ ID NO: 708 - protein, 1345 aa, Streptococcus mutans; identical to SEQ ID NO: 707

SEQ ID NO: 709 - protein, 1345 aa, Streptococcus mutans; identical to SEQ ID NO: 704

SEQ ID NO: 710 - protein, 1345 aa, Streptococcus mutans; identical to SEQ ID NO: 705

SEQ ID NO: 711 - protein, 1345 aa, Streptococcus mutans; identical to SEQ ID NO: 706

SEQ ID NO: 712 - protein, 1345 aa, Streptococcus mutans
MKKPYSIGLDIGTNSVGWAVVTDDYKVPAKKMKVLGNTDKSHIKKNLLGALLFDSGNTAEDRRLKRTARRRYTRRRNRILYLQEIFSEEMGKVDDSFFHRLEDSFLVTEDKRGERHPIFGNLEEEVKYHENFPTIYHLRQYLADNPEKVDLRLVYLALAHIIKFRGHFLIEGKFDTRNNDVQKLFQEFLAVYDNTFENSSLQEQNVQVEEILTDKISKSAKKDRVLKLFPNEKSNGRFAEFLKLIVGNQADFKKHFELEEKAPLQLSKDTYEEELEVLLAQIGDNYAELFLSAKKLYDSILLSGILTVTDVSTKAPLSASMIQRYNEHQMDLAQLKQFIRQKLSDKYNEVFSDVSKDGYAGYIDGKTNQEAFYKYLKGLLNKIEGSGYFLDKIEREDFLRKQRTFDNGSIPHQIHLQEMRAIIRRQAEFYPFLADNQDRIEKILTFRIPYYVGPLARGKSDFAWLSRKSADKITPWNFDEIVDKESSVEAFINRMTNYDLYLPNQKVLPKHSLLYEKFTVYNELTKVKYKTEQGKTAFFDANMKQEIFDGVFKVYRKVTKDKLMDFLEKEFDEFRIVDLTGLDKENKAFNASYGTYHDLRKILDKDFLDNSKNEKILEDIVLTLTLFEDREMIRKRLENYSDLLTKEQVKKLERRHYTGWGRLSAELIHGIRNKESRKTLLDYLIDDGNSNRNFMQLINDDALSFKEEIAKAQVIGETDNLNQVVSDIAGSPAIKKGILQSLKIVDELVKIMGHQPENIVVEMARENQFTNQGRRNSQQRLKGLTDSIKEFGSQILKEHPVENSQLQNDRLFLYYLQNGRDMYTGEELDIDYLSQYDIDHIIPQAFIKDNSIDNRVLTSSKENRGKSDDVPSKDVVRKMKSYWSKLLSAKLITQRKFDNLTKAERGGLTDDDKAGFIKRQLVETRQITKHVARILDERFNTETDENNKKIRQVKIVTLKSNLVSNFRKEFELYKVREINDYHHAHDAYLNAVIGKALLGVYPQLEPEFVYGDYPHFHGHKENKATAKKFFYSNIMNFFKKDDVRTDKNGEIIWKKDEYISNIKKVLSYPQVNIVKKVEEQTGGFSKESILPKGNSDKLIPRKTKKFYWDTKKYGGFDSPIVAYSILVIADIEKGKSKKLKTVKALVGVTIMEKMTFERDPIAFLERKGYRNVQEENIIKLPKYSLFKLENGRKRLLASARELQKGNEIVLPNHLGTLLYHAKNIHKVDEPKHLDYVDKHKDEFKELLDVVSNFSKKYTLAEGNLEKIKELYAQNNGEDLKELASSFINLLTFTAIGAPATFKFFDKNIDRKRYTSTTEILNATLIHQSITGLYETRIDLSKLGGD

SEQ ID NO: 713 - protein, 1345 aa, Streptococcus mutans; identical to SEQ ID NO: 712

SEQ ID NO: 714 - protein, 1345 aa, Streptococcus mutans
MKKPYSIGLDIGTNSVGWAVVTDDYKVPAKKMKVLGNTDKSHIKKNLLGALLFDSGNTAEDRRLKRTARRRYTRRRNRILYLQEIFSEEMGKVDDSFFHRLEDSFLVTEDKRGERHPIFGNLEEEVKYHENFPTIYHLRQYLADNPEKVDLRLVYLALAHIIKFRGHFLIEGKFDTRNNDVQRLFQEFLAVYDNTFENSSLQEQNVQVEEILTDKISKSAKKDRVLKLFPNEKSNGRFAEFLKLIVGNQADFKKHFELEEKAPLQFSKDTYEEDLEELLGKIGDDYADLFTLAKNLYDAILLSGILTADDSSTKAPLSASMIQRYNEHQMDLAQLKQFIRQKLSDKYNEVFSDVSKDGYAGYIDGKTNQEAFYKYLKGLLNKIEGSGYFLDKIEREDFLRKQRTFDNGSIPHQIHLQEMRAIIRRQAEFYPFLADNQDRIEKILTFRIPYYVGPLARGKSDFAWLSRKSADKITPWNFDEIVDKESSAEAFINRMTNYDLYLPNQKVLPKHSLLYEKFTVYNELTKVKYKTEQGKTAFFDANMKQEIFDGVFKVYRKVTKDKLMDFLEKEFDEFRIVDLTGLDKENKVFNASYGTYHDLCKILDKDFLDNSKNEKILEDIVLTLTLFEDREMIRKRLENYSDLLTKEQVKKLERRHYTGWGRLSAELIHGIRNKESRKTILDYLIDDGNSNRNFMQLINDDALSFKEEIAKAQVIGETDNLNQVVSDIAGSPAIKKGILQSLKIVDELVKIMGHQPENIVVEMARENQFTNQGRRNSQQRLKGLTDSIKEFGSQILKEHPVENSQLQNDRLFLYYLQNGRDMYTGEELDIDYLSQYDIDHIIPQAFIKDNSIDNRVLTSSKENRGKSDDVPSKDVVRKMKSYWSKLLSAKLITQRKFDNLTKAERGGLTDDDKAGFIKRQLVETRQITKHVARILDERFYTETDENNKKIRQVKIVTLKSNLVSNFRKEFELYKVREINDYHHAHDAYLNAVIGKALLGVYPQLEPEFVYGDYPHFHGHKENKATAKKFFYSNIMNFFKKDDVRTDKNGEIIWKKDEHISNIKKVLSYPQVNIVKKVEEQTGGFSKESILPKGNSDKLIPRKTKKFYWDTKKYGGFDSPIVAYSILVIADIEKGKSKKLKTVKALVGVTIMEKMTFERDPVAFLERKGYRNVQEENIIKLPKYSLFKLENGRKRLLASARELQKGNEIVLPNHLGTLLYHAKNIHKVDEPKHLDYVDKHKDEFKELLDVVSNFSKKYTLAEGNLEKIKELYAQNNGEDLKELASSFINLLTFTAIGAPATFKFFDKNIDRKRYTSTTEILNATLIHQSITGLYETRIDLSKLGGD

SEQ ID NO: 715 - protein, 1345 aa, Streptococcus mutans
MKKPYSIGLDIGTNSVGWAVVTDDYKVPAKKMKVLGNTDKSHIKKNLLGALLFDSGNTAEDRRLKRTARRRYTRRRNRILYLQEIFSEEMGKVDDSFFHRLEDSFLVTEDKRGERHPIFGNLEEEVKYHENFPTIYHLRQYLADNPEKVDLRLVYLALAHIIKFRGHFLIEGKFDTRNNDVQRLFQEFLAVYDNTFENSSLQEQNVQVEEILTDKISKSAKKDRVLKLFPNEKSNGRFAEFLKLIVGNQADFKKHFELEEKAPLQFSKDTYEEDLEELLGKIGDDYADLFTLAKNLYDAILLSGILTADDSSTKAPLSASMIQRYNEHQMDLAQLKQFIRQKLSDKYNEVFSDVSKDGYAGYIDGKTNQEAFYKYLKGLLNKIEGSGYFLDKIEREDFLRKQRTFDNGSIPHQIHLQEMRAIIRRQAEFYPFLADNQDRIEKILTFRIPYYVGPLARGKSDFAWLSRKSADKITPWNFDEIVDKESSAEAFINRMTNYDLYLPNQKVLPKHSLLYEKFTVYNELTKVKYKTEQGKTAFFDANMKQEIFDGVFKVYRKVTKDKLMDFLEKEFDEFRIVDLTGLDKENKVFNASYGTYHDLCKILDKDFLDNSKNEKILEDIVLTLTLFEDREMIRKRLENYSDLLTKEQVKKLERRHYTGWGRLSAELIHGIRNKESRKTILDYLIDDGNSNRNFMQLINDDALSFKEEIAKAQVIGETDNLNQVVSDIAGSPAIKKGILQSLKIVDELVKIMGHQPENIVVEMARENQFTNQGRRNSQQRLKGLTDSIKEFGSQILKEHPVENSQLQNDRLFLYYLQNGRDMYTGEELDIDYLSQYDIDHIIPQAFIKDNSIDNRVLTSSKENRGKSDDVPSKDVVRKMKPYWSKLLSAKLITQRKFDNLTKAERGGLTDDDKAGFIKRQLVETRQITKHVARILDERFNTETDENNKKIRQVKIVTLKSNLVSNFRKEFELYKVREINDYHHAHDAYLNAVIGKALLGVYPQLEPEFVYGDYPHFHGHEENKATAKKFFYSNIMNFFKKDDVRTDKNGEIIWKKDEHISNIKKVLSYPQVNIVKKVEEQTGGFSKESILPKGNSDKLIPRKTKKFYWDTKKYGGFDSPIVAYSILVIADIEKGKSKKLKTVKALVGVTIMEKMTFERDPVAFLERKGYRNVQEENIIKLPKYSLFKLENGRKRLLASARELQKGNEIVLPNHLGTLLYHAKNIHKVDEPKHLDYVDKHKDEFKELLDVVSNFSKKYTLAEGNLEKIKELYAQNNGEDLKELASSFINLLTFTAIGAPATFKFFDKNIDRKRYTSTTEILNATLIHQSITGLYETRIDLSKLGGD

SEQ ID NO: 716 - protein, 1345 aa, Streptococcus mutans
MKKPYSIGLDIGTNSVGWAVVTDDYKVPAKKMKVLGNTDKSHIKKNLLGALLFDSGNTAEDRRLKRTARRRYTRRRNRILYLQEIFSEEMGKVDDSFFHRLEDSFLVTEDKRGERHPIFGNLEEEVKYHENFPTIYHLRQYLADNPEKVDLRLVYLALAHIIKFRGHFLIEGKFDTRNNDVQRLFQEFLAVYDNTFENSSLQEQNVQVEEILTDKISKSAKKDRVLKLFPNEKSNGRFAEFLKLIVGNQADFKKHFELEEKAPLQFSKDTYEEELEVLLAQIGDNYAELFLSAKKLYDSILLSGILTVTDVSTKAPLSASMIQRYNEHQMDLAQLKQFIRQKLSDKYNEVFSDVSKDGYAGYIDGKTNQEAFYKYLKGLLNKIEGSGYFLDKIEREDFLRKQRTFDNGSIPHQIHLQEMRAIIRRQAEFYPFLADNQDRIEKILTFRIPYYVGPLARGKSDFAWLSRKSADKITPWNFDEIVDKESSAEAFINRMTNYDLYLPNQKVLPKHSLLYEKFTVYNELTKVKYKTEQGKTAFFDANMKQEIFDGVFKVYRKVTKDKLMDFLEKEFDEFRIVDLTGLDKENKVFNASYGTYHDLCKILDKDFLDNSKNEKILEDIVLTLTLFEDREMIRKRLENYSDLLTKEQVKKLERRHYTGWGRLSAELIHGIRNKESRKTILDYLIDDGNSNRNFMQLINDDALSFKEEIAKAQVIGETDNLNQVVSDIAGSPAIKKGILQSLKIVDELVKIMGHQPENIVVEMARENQFTKQGRRNSQQRLKGLTDSIKEFGSQILKEHPVENSQLQNDRLFLYYLQNGRDMYTGEELDIDYLSQYDIDHIIPQAFIKDNSIDNRVLTSSKENRGKSDDVPSKDVVRKMKSYWSKLLSAKLITQRKFDNLTKAERGGLTDDDKAGFIKRQLVETRQITKHVARILDERFYTETDENNKKIRQVKIVTLKSNLVSNFRKEFELYKVREINDYHHAHDAYLNAVIGKALLGVYPQLEPEFVYGDYPHFHGHKENKATAKKFFYSNIMNFFKKDDVRTDKNGEIIWKKDEHISNIKKVLSYPQVNIVKKVEEQTGGFSKESILPKGNSDKLIPRKTKKFYWDTKKYGGFDSPIVAYSILVIADIEKGKSKKLKTVKALVGVTIMEKMTFERDPVAFLERKGYRNVQEENIIKLPKYSLFKLENGRKRLLASARELQKGNEIVLPNHLGTLLYHAKNIHKVDEPKHLDYVDKHKDEFKELLDVVSNFSKKYTLAEGNLEKIKELYAQNNGEDLKELASSFINLLTFTAIGAPATFKFFDKNIDRKRYTSTTEILNATLIHQSITGLYETRIDLSKLGGD

SEQ ID NO: 717 - protein, 1345 aa, Streptococcus mutans
MKKPYSIGLDIGTNSVGWAVVTDDYKVPAKKMKVLGNTDKSHIKKNLLGALLFDSGNTAEDRRLKRTARRRYTRRRNRILYLQEIFSEEMGKVDDSFFHRLEDSFLVTEDKRGERHPIFGNLEEEVKYHENFPTIYHLRQYLADNPEKVDLRLVYLALAHIIKFRGHFLIEGKFDTRNNDVQRLFQEFLAVYDNTFENSSLQEQNVQVEEILTDKISKSAKKDRVLKLFPNEKSNGRFAEFLKLIVGNQADFKKHFELEEKAPLQFSKDTYEEELEVLLAQIGDNYAELFLSAKKLYDSILLSGILTVTDVSTKAPLSASMIQRYNEHQMDLAQLKQFIRQKLSDKYNEVFSDVSKDGYAGYIDGKTNQEAFYKYLKGLLNKIEGSGYFLDKIEREDFLRKQRTFDNGSIPHQIHLQEMRAIIRRQAEFYPFLADNQDRIEKILTFRIPYYVGPLARGKSDFAWLSRKSADKITPWNFDEIVDKESSAEAFINRMTNYDLYLPNQKVLPKHSLLYEKFTVYNELTKVKYKTEQGKTAFFDANMKQEIFDGVFKVYRKVTKDKLMDFLEKEFDEFRIVDLTGLDKENKVFNASYGTYHDLCKILDKDFLDNSKNEKILEDIVLTLTLFEDREMIRKRLENYSDLLTKEQVKKLERRHYTGWGRLSAELIHGIRNKESRKTILDYLIDDGNSNRNFMQLINDDALSFKEEIAKAQVIGETDNLNQVVSDIAGSPAIKKGILQSLKIVDELVKIMGHQPENIVVEMARENQFTKQGRRNSQQRLKGLTDSIKEFGSQILKEHPVENSQLQNDRLFLYYLQNGRDMYTGEELDIDYLSQYDIDHIIPQAFIKDNSIDNRVLTSSKENRGKSDDVPSKDVVRKMKSYWSKLLSAKLITQRKFDNLTKAERGGLTDDDKAGFIKRQLVETRQITKHVARILDERFYTETDENNKKIRQVKIVTLKSNLVSNFRKEFELYKVREINDYHHAHDAYLNAVIGKALLGVYPQLEPEFVYGDYPHFHGHKENKATAKKFFYSNIMNFFKKDDVRTDRNGEIIWKKDEHISNIKKVLSYPQVNIVKKVEEQTGGFSKESILPKGNSDKLIPRKTKKFYWDTKKYGGFDSPIVAYSILVIADIEKGKSKKLKTVKALVGVTIMEKMTFERDPVAFLERKGYRNVQEENIIKLPKYSLFKLENGRKRLLASARELQKGNEIVLPNHLGTLLYHAKNIHKVDEPKHLDYVDKHKDEFKELLDVVSNFSKKYTLAEGNLEKIKELYAQNNGEDLKELASSFINLLTFTAIGAPATFKFFDKNIDRKRYTSTTEILNATLIHQSITGLYETRIDLSKLGGD

SEQ ID NO: 718 - protein, 1345 aa, Streptococcus mutans
MKKPYSIGLDIGTNSVGWAVVTDDYKVPAKKMKVLGNTDKSHIKKNLLGALLFDSGNTAEDRRLKRTARRRYTRRRNRILYLQEIFSEEMGKVDDSFFHRLEDSFLVTEDKRGERHPIFGNLEEEVKYHENFPTIYHLRQYLADNPEKVDLRLVYLALAHIIKFRGHFLIEGKFDTRNNDVQRLFQEFLAVYDNTFENSSLQEQNVQVEEILTDKISKSAKKDRVLKLFPNEKSNGRFAEFLKLIVGNQADFKKHFELEEKAPLQFSKDTYEEELEVLLAQIGDNYAELFLSAKKLYDSILLSGILTVTDVSTKAPLSASMIQRYNEHQMDLAQLKQFIRQKLSDKYNEVFSDVSKDGYAGYIDGKTNQEAFYKYLKGLLNKIEGSGYFLDKIEREDFLRKQRTFDNGSIPHQIHLQEMRAIIRRQAEFYPFLADNQDRIEKILTFRIPYYVGPLARGKSDFAWLSRKSADKITPWNFDEIVDKESSAEAFINRMTNYDLYLPNQKVLPKHSLLYEKFTVYNELTKVKYKTEQGKTAFFDANMKQEIFDGVFKVYRKVTKDKLMDFLEKEFDEFRIVDLTGLDKENKVFNASYGTYHDLCKILDKDFLDNSKNEKILEDIVLTLTLFEDREMIRKRLENYSDLLTKEQVKKLERRHYTGWGRLSAELIHGIRNKESRKTILDYLIDDGNSNRNFMQLINDDALSFKEEIAKAQVIGETDNLNQVVSDIAGSPAIKKGILQSLKIVDELVKIMGHQPENIVVEMARENQFTNQGRQNSQQRLKGLTDSIKEFGSQILKEHPVENSQLQNDRLFLYYLQNGRDMYTGEELDIDYLSQYDIDHIIPQAFIKDNSIDNRVLTSSKENRGKSDDVPSEDVVRKMKSYWSKLLSAKLITQRKFDNLTKAERGGLTDDDKAGFIKRQLVETRQITKHVARILDERFYTETDENNKKIRQVKIVTLKSNLVSNFRKEFELYKVREINDYHHAHDAYLNAVIGKALLGVYPQLEPEFVYGDYPHFHGHKENKATAKKFFYSNIMNFFKKDDVRTDKNGEIIWKKDEHISNIKKVLSYPQVNIVKKVEEQTGGFSKESILPKGNSDKLIPRKTKKFYWDTKKYGGFDSPIVAYSILVIADIEKGKSKKLKTVKALVGVTIMEKMTFERDPVAFLERKGYRNVQEENIIKLPKYSLFKLENGRKRLLASARELQKGNEIVLPNHLGTLLYHAKNIHKVDEPKHLDYVDKHKDEFKELLDVVSNFSKKYTLAEGNLEKIKELYAQNNGEDLKELASSFINLLTFTAIGAPATFKFFDKNIDRKRYTSTTEILNATLIHQSITGLYETRIDLSKLGGD

SEQ ID NO: 719 - protein, 1345 aa, Streptococcus mutans; identical to SEQ ID NO: 718

SEQ ID NO: 720 - protein, 1345 aa, Streptococcus mutans; identical to SEQ ID NO: 714

SEQ ID NO: 721 - protein, 1345 aa, Streptococcus mutans; identical to SEQ ID NO: 715

SEQ ID NO: 722 - protein, 1345 aa, Streptococcus mutans; identical to SEQ ID NO: 716

SEQ ID NO: 723 - protein, 1345 aa, Streptococcus mutans; identical to SEQ ID NO: 717

SEQ ID NO: 724 - protein, 1345 aa, Streptococcus mutans; identical to SEQ ID NO: 716

SEQ ID NO: 725 - protein, 1345 aa, Streptococcus mutans; identical to SEQ ID NO: 716

SEQ ID NO: 726 - protein, 1345 aa, Streptococcus mutans; identical to SEQ ID NO: 716

SEQ ID NO: 727 - protein, 1345 aa, Streptococcus mutans; identical to SEQ ID NO: 717

SEQ ID NO: 728 - protein, 1345 aa, Streptococcus mutans
MKKPYSIGLDIGTNSVGWAVVTDDYKVPAKKMKVLGNTDKSHIKKNLLGALLFDSGNTAEDRRLKRTARRRYTRRRNRILYLQEIFSEEMGKVNDSFFHRLEDSFLVTEDKRGERHPIFGNLEEEVKYHENFPTIYHLRQYLADNPEKVDLRLVYLALAHIIKFRGHFLIEGKFDTRNNDVQRLFQEFLAVYDNTFENSSLQEQNVQVEEILTDKISKSAKKDRVLKLFPNEKSNGRFAEFLKLIVGNQADFKKHFELEEKAPLQFSKDTYEEELEVLLAQIGDNYAELFLSAKKLYDSILLSGILTVTDVSTKAPLSASMIQRYNEHQMDLAQLKQFIRQKLSDKYNEVFSDVSKDGYAGYIDGKTNQEAFYKYLKGLLNKIEGSGYFLDKIEREDFLRKQRTFDNGSIPHQIHLQEMRAIIRRQAEFYPFLADNQDRIEKILTFRIPYYVGPLARGKSDFAWLSRKSADKITPWNFDEIVDKESSAEAFINRMTNYDLYLPNQKVLPKHSLLYEKFTVYNELTKVKYKTEQGKTAFFDANMKQEIFDGVFKVYRKVTKDKLMDFLEKEFDEFRIVDLTGLDKENKVFNASYGTYHDLCKILDKDFLDNSKNEKILEDIVLTLTLFEDREMIRKRLENYSDLLTKEQVKKLERRHYTGWGRLSAELIHGIRNKESRKTILDYLIDDGNSNRNFMQLINDDALSFKEEIAKAQVIGETDNLNQVVSDIAGSPAIKKGILQSLKIVDELVKIMGHQPENIVVEMARENQFTKQGRRNSQQRLKGLTDSIKEFGSQILKEHPVENSQLQNDRLFLYYLQNGRDMYTGEELDIDYLSQYDIDHIIPQAFIKDNSIDNRVLTSSKENRGKSDDVPSKDVVRKMKSYWSKLLSAKLITQRKFDNLTKAERGGLTDDDKAGFIKRQLVETRQITKHVARILDERFYTETDENNKKIRQVKIVTLKSNLVSNFRKEFELYKVREINDYHHAHDAYLNAVIGKALLGVYPQLEPEFVYGDYPHFHGHKENKATAKKFFYSNIMNFFKKDDVRTDKNGEIIWKKDEYISNIKKVLSYPQVNIVKKVEEQTGGFSKESILPKGNSDKLIPRKTKKFYWDTKKYGGFDSPIVAYSILVIADIEKGKSKKLKTVKALVGVTIMEKMTFERDPIAFLERKGYRNVQEENIIKLPKYSLFKLENGRKRLLASARELQKGNEIVLPNHLGTLLYHAKNIHKVDEPKHLDYVDKHKDEFKELLDVVSNFSKKYTLAEGNLEKIKELYAQNNGEDLKELASSFINLLTFTAIGAPAAFKFFDKNIDRKRYTSTTEILNATLIHQSITGLYETRIDLSKLGGD

SEQ ID NO: 729 - protein, 1345 aa, Streptococcus mutans; identical to SEQ ID NO: 728

SEQ ID NO: 730 - protein, 1345 aa, Streptococcus mutans
MKKPYSIGLDIGTNSVGWAVVTDDYKVPAKKMKVLGNTDKSHIKKNLLGALLFDSGNTAEDRRLKRTTRRRYTRRRNRILYLQEIFSEEMGKVDDSFFHRLEDSFLVTEDKRGERHPIFGNLEEEVKYHENFPTIYHLRQYLADNPEKTDLRLVYLALAHIIKFRGHFLIEGKFDTRNNDVQRLFQEFLAVYDNTFENSSLQEQNVQVEEILTDKISKSAKKDRVLKLFPNEKSNGCFAEFLKLIVGNQADFKKHFELEEKAPLQFSKDTYEEELEVLLAQIGDNYAELFLSAKKLYDSILLSGILTVTDVSTKAPLSASMIQRYNEHQMDLTQLKQFIRQKLSDKYNEVFSDVSKDGYAGYIDGKTNQEAFYKYLKGLLNKIEGSGYFLDKIEREDFLRKQRTFDNGSIPHQIHLQEMRAIIRRQAEFYPFLADNQDRIEKLLTFRIPYYVGPLASGKSDFAWLSRKSADKITPWNFDEIVDKESSAEAFINRMTNYDLYLPNQKVLPKHSLLYEKFTVYNELTKVKYKTEQGKTAFFDANMKQEIFDGVFKVYRKVTKDKLMDFLEKEFDEFRIVDLTGLDKENKVFNASYGTYHDLCKILDKDFLDNSKNEKILEDIVLTLTLFEDREMIRKRLENYSDLLTKEQVKKLERRHYTGWGRLSAELIHGIRNKESRKTILDYLIDDGNSNRNFMQLINDDALSFKEEIAKAQVIGETDNLNQVVSDIAGSPAIKKGILQSLKIVDELVKIMGHQPENIVVEMARENQFTNQGRRNSQQRLKGLTDSIKEFGSQILKEHPVENSQLQNDRLFLYYLQNGRDMYTGEELDIDYLSQYDIDHIIPQAFIKDNSIDNRVLTSSKENRGKSDDVPSKDVVRKMKSYWSKLLSAKLITQRKFDNLTKAERGGLTDDDKAGFIKRQLVETRQITKHVARILDERFNTETDENNKKIRQVKIVTLKSNLVSNFRKEFELYKVREINDYHHAHDAYLNAVIGKALLGVYPQLEPEFVYGDYPHFHGHKENKATAKKFFYSNIMNFFKKDDVRTDKNGEIIWKKDEHISNIKKVLSYPQVNIVKKVEEQTGGFSKESILPKGNSDKLIPRKTKKFYWDTKKYGGFDSPIVAYSILVIADIEKGKSKKLKTVKALVGVTIMEKMTFERDPVAFLERKGYRNVQEENIIKLPKYSLFKLENGRKRLLASARELQKGNEIVLPNHLGTLLYHAKNIHKVDEPKHLDYVDKHKDEFKELLDVVSNFSKKYTLAEGNLEKIKELYAQNNGEDLKELASSFINLLTFTAIGAPATFKFFDKNIDRKRYTSTTEILNATLIHQSITGLYETRIDLSKLGGD

SEQ ID NO: 731 - protein, 1345 aa, Streptococcus mutans; identical to SEQ ID NO: 730

SEQ ID NO: 732 - protein, 1350 aa, Streptococcus mutans
MKKPYSIGLDIGTNSVGWAVVTDDYKVPAKKMTVLGNTDKSHIKKNLLGALLFDSGNTAADRRLKRTARRRYTRRRNRILYLQEIFAEEMSKVDDSFFHRLEDSFLVTEDKRGERHPIFGNLEEEVKYHENFPTIYHLRQYLADNPEKVDLRLVYLALAHIIKFRGHFLIEGKFDTRNNDVQRLFQEFLAVYDNTFENSSLQEQNVQVEEILTDKISKSAKKDRVLKLFPNEKSNGRFAEFLKLIVGNQADFKKHFELEEKTPLQFSKDTYEEELEVLLAQIGDNYAELFLSAKKLYDSILLSGILTVTDVSTKAPLSASMIQRYNEHQMDLAQLKQFIRQKLSDKYNEVFSDVSKDGYAGYIDGKTNQEAFYKYLKGLLNKIEGSGYFLDKIEREDFLRKQRTFDNGSIPHQIHLQEMRAIIRRQAEFYPFLADNQDRIEKILTFRIPYYVGPLARGKSDFAWLSRKSADKITPWNFDEIVDKESSAEAFINRMTNYDLYLPNQKVLPKHSLLYEKFTVYNELTKVKYKTEQGKTAFFDANMKQEIFDGVFKVYRKVTKDKLMDFLEKEFDEFRIVDLTGLDKENKAFNASYGTYHDLRKILDKDFLDNSKNEKILEDIVLTLTLFEDREMIRKRLENYSDLLTKEQVKKLERRHYTGWGRLSAELIHGIRNKESRKTILDYLIDDGNSNRNFMQLINDDALSFKEEIAKAQVIGETDNLNQVVSDIAGSPAIKKGILQSLKIVDELVKIMGHQPENIVVEMARENQFTNQGRRNSQQRLKGLTDSIKEFGSQILKEHPVENSQLQNDRLFLYYLQNGRDMYTGEELDIDYLSQYDIDHIIPQAFIKDNSIDNRVLTSSKENRGKSDDVPSEDVVNRMRPFWNKLLSSGLISQRKYNNLTKKELTPDDKAGFIKRQLVETRQITKHVARMLDERFNKEFDDNNKRIRRVKIVTLKSNLVSSFRKEFELYKVREINDYHHAHDAYLNAVVVKALLVKYPKLEPEFVYGEYPKYNSYRERKTATQKMFFYSNIMNMFKSKVKLADDQIVERPMIEVNDETGEIAWDKTKHITTVKKVLSYPQVNIVKKVEEQTIGQNGGLFDDNPKSPLEVIPSKLVPLKKALNPEKYGGYQKPTTAYPILLIVDTKQLIPISVMDKKRFEQNPVKFLKDKGYQQIEKNNFVKLPKYTLVDIGNGIKRLWASSKEVHKGNQLVVSKKSQDLLYHAHHLDNDYSNEYVKNHYQQFDILFNEITSFSKKCKLGKEHIQKIEEAYSKERDSASIEELADGFIKLLGFTQLGATSPFSFLGIKLNQKQYTGKKDYLLPCMEATLIHQSITGLYETRIDLSKLGGD

SEQ ID NO: 733 - protein, 1350 aa, Streptococcus mutans; identical to SEQ ID NO: 732

SEQ ID NO: 734 - protein, 1345 aa, Streptococcus mutans
MKKPYSIGLDIGTNSVGWAVVTDDYKVPDKKMKVLGNTDKSHIKKNLLGALLFDSGNTAEDRRLKRTARRRYTRRRNRILYLQEIFSEEMGKVDDSFFHRLEDSFLVTEDKRGERHPIFGNLEEEVKYHENFPTIYHLRQYLADNPEKTDLRLVYLALAHIIKFRGHFLIEGKFDTRNNDVQRLFQEFLAVYDNTFENSSLQEQNVQVEEILTDKISKSAKKDRVLKLFPNEKSNGRFAEFLKLIVGNQADFKKHFELEEKAPLQFSKDIYEEELEVLLAQIGDNYAELFLSAKKLYDSILLSGILTVTDVSTKAPLSASMIQRYNEHQMDLAQLKQFIRQKLSDKYNEVFSDVSKDGYAGYIDGKTNQEAFYKYLKGLLNKIEGSGYFLDKIEREDFLRKQRTFDNGSIPHQIHLQEMRAIIRRQAEFYPFLADNQDRIEKILTFRIPYYVGPLARGKSDFAWLSRKSADKITPWNFDEIVDKESSVEAFINRMTNYDLYLPNQKVLPKHSLLYEKFTVYNELTKVKYKTEQGKTAFFDANMKQEIFDGVFKVYRKVTKDKLMDFLEKEFDEFRIVDLTGLDKENKAFNASYGTYHDLRKILDKDFLDNSKNEKILEDIVLTLTLFEDREMIRKRLKNYSDLLTKEQLKKLERRHYTGWGRLSAELIHGIRNKESRKTILDYLIDDGNSNRNFMQLINDDALSFKEEIAKAQVIGETDNLNQVVSDIAGSPAIKKGILQSLKIVDELVKIMGHQPENIVVEMARENQFTNQGRRNSQQRLKGLTDSIKEFGSQILKEHPVENSQLQNDRLFLYYLQNGRDMYTGEELDIDYLSQYDIDHIIPQAFIKDNSIDNRVLTSSKENRGKSDDVPSKDVVRKMKSYWSKLLSAKLITQRKFDNLTKAERGGLTDDDKAGFIKRQLVETRQITKHVARILDERFYTETDENNKKIRQVKIVTLKSNLVSNFRKEFELYKVREINDYHHAHDAYLNAVIGKALLGVYPQLEPEFVYGDYPHFHGHKENKATAKKFFYSNIMNFFKKDDVRTDKNGEIIWKKDEHISNIKKVLSYPQVNIVKKVEEQTGGFSKESILPKGNSDKLIPRKTKKFYWDTKKYGGFDSPIVAYSILVIADIEKGKSKKLKTVKALVGVTIMEKMTFERDPVAFLERKGYRNVQEENIIKLPKYSLFKLENGRKRLLASARELQKGNEIVLPNHLGTLLYHAKNIHKVDEPKHLDYVDKHKDEFKELLDVVSNFSKKYTLAEGNLEKIKELYAQNNGEDLKELASSFINLLTFTAIGAPATFKFFDKNIDRKRYTSTTEILNATLIHQSITGLYETRIDLSKLGGD

SEQ ID NO: 735 - protein, 1345 aa, Streptococcus mutans
MKKPYSIGLDIGTNSVGWAVVTDDYKVSAKKMKVLGNTDKSHIKKNLLGALLFDSGNTAEDRRLKRTARRRYTRRRNRILYLQEIFAEEMSKVDDSFFHRLEDSFLVTEDKRGERHPIFGNLEEEVKYHENFPTIYHLRQYLADNPEKVDLRLVYLALAHIIKFRGHFLIEGKFDTRNNDVQRLFQEFLAVYDNTFENSSLQEQNVQVEEILTDKISKSAKKDRVLKLFPNEKSNGRFAEFLKLIVGNQADFKKHFELEEKAPLQFSKDTYEEELEVLLAQIGDNYAELFLSAKKLYDSILLSGILTVTDVSTKAPLSASMIQRYNEHQMDLAQLKQFIRQKLSDKYNEVFSDVSKDGYAGYIDGKTNQEAFYKYLKGLLNKIEGSGYFLDKIEREDFLRKQRTFDNGSIPHQIHLQEMRAIIRRQAEFYPFLADNQDRIEKILTFRIPYYVGPLARGKSDFAWLSRKSADKITPWNFDEIVDKESSAEAFINRMTNYDLYLPNQKVLPKHSLLYEKFTVYNELTKVKYKTEQGKTAFFDANMKQEIFDGVFKVYRKVTKDKLMDFLEKEFDEFRIVDLTGLDKENKAFNASYGTYHDLRKILDKDFLDNSKNEKILEDIVLTLTLFEDREMIRKRLENYSDLLTKEQVKKLERRHYTGWGRLSAELIHGIRNKESRKTILDYLIDDGNSNRNFMQLINDDALSFKEEIAKAQVIGETDNLNQVVSDIAGSPAIKKGILQSLKIVDELVKIMGHQPENIVVEMARENQFTNQGRRNSQQRLKGLTDSIKEFGSQILKEHPVEHSQLQNDRLFLYYLQNGRDMYTGEELDIDYLSQYDIDHIIPQAFIKDNSIDNRVLTSSKENRGKSDDVPSKNVVRKMKSYWSKLLSAKLITQRKFDNLTKAERGGLTDDDKAGFIKRQLVETRQITKHVARILDERFHTETDENNKKIRQVKIVTLKSNLVSNFRKEFELYKVREINDYHHTHDAYLNAVIGKALLGVYPQLEPEFVYGDYPHFHGHKENKATAKKFFYSNIMNFFKKDDVRTDKNGEIIWKKDEHISNIKKVLSYPQVNIVKKVEEQTGGFSKESILPKGNSDKLIPRKTKKFYWDTKKYGGFDSPIVAYSILVIADIEKGKSKKLKTVKALVGVTIMEKMTFERDPVAFLERKGYRNVQEENIIKLPKYSLFKLENGRKRLLASARELQKGNEIVLPNHLGTLLYHAKNIHKVDEPKHLDYVDKHKDEFKELLDVVSNFSKKYTLAEGNLEKIKELYAQNNGEDLKELASSFINLLTFTAIGAPATFKFFDKNIDRKRYTSTTEILNATLIHQSITGLYETRIDLSKLGGD

SEQ ID NO: 736 - protein, 1345 aa, Streptococcus mutans; identical to SEQ ID NO: 735

SEQ ID NO: 737 - protein, 1345 aa, Streptococcus mutans
MKKPYSIGLDIGTNSVGWSVVTDDYKVPAKKMKVLGNTDKSHIEKNLLGALLFDSGNTAEDRRLKRTARRRYTRRRNRILYLQEIFSEEMGKVDDSFFHRLEDSFLVTEDKRGERHPIFGNLEEEVKYHENFPTIYHLRQYLADNPEKVDLRLVYLALAHIIKFRGHFLIEGKFDTRNNDVQRLFQEFLAVYDNTFENSSLQEQNVQVEEILTDKISKSAKKDRVLKLFPNEKSNGRFAEFLKLIVGNQADFKKHFELEEKAPLQFSKDTYEEELEVLLAQIGDNYAELFLSAKKLYDSILLSGILTVTDVGTKAPLSASMIQRYNEHQMDLAQLKQFIRQKLSDKYNEVFSDVSKDGYAGYIDGKTNQEAFYKYLKGLLNKIEGSGYFLDKIEREDFLRKQRTFDNGSIPHQIHLQEMRAIIRRQAEFYPFLADNQDRIEKLLTFRIPYYVGPLARGKSDFAWLSRKSADKITPWNFDEIVDKESSAEAFINRMTNYDLYLPNQKVLPKHSLLYEKFTVYNELTKVKYKTEQGKTAFFDANMKQEIFDGVFKVYRKVTKDKLMDFLEKEFDEFRIVDLTGLDKENKVFNASYGTYHDLCKILDKDFLDNSKNEKILEDIVLTLTLFEDREMIRKRLENYSDLLTKEQVKKLERRHYTGWGRLSAELIHGIRNKESRKTILDYLIDDGNSNRNFMQLINDDALSFKEEIAKAQVIGETDNLNQVVSDIAGSPAIKKGILQSLKIVDELVKIMGHQPENIVVEMARENQFTNQGRRNSQQRLKGLTDSIKEFGSQILKEHPVENSQLQNDRLFLYYLQNGRDMYTGEELDIDYLSQYDIDHIIPQAFIKDNSIDNRVLTSSKENRGKSDDVPSKDVVRKMKSYWSKLLSAKLITQRKFDNLTKAERGGLTDDDKAGFIKRQLVETRQITKHVARILDERFNTETDENNKKIRQVKIVTLKSNLVSNFRKEFELYKVREINDYHHAHDAYLNAVIGKALLGVYPQLEPEFVYGDYPHFHGHKENKATAKKFFYSNIMNFFKKDDVRIDKNGEIIWKKDEHISNIKKVLSYPQVNIVKKVEEQTGGFSKESILPKGNSDKLIPRKTKKFYWDTKKYGGFDSPIVAYSILVIADIEKGKSKKLKTVKALVGVTIMEKMTFERDPVAFLERKGYRNVQEENIIKLPKYSLFKLENGRKRLLASARELQKGNEIVLPNHLGTLLYHAKNIHKVDEPKHLDYVDKHKDEFKELLDVVSNFSKKYTLAEGNLEKIKELYAQNNGEDLKELASSFINLLTFTAIGAPATFKFFDKNIDRKRYTSTTEILNATLIHQSITGLYETRIDLSKLGGD

SEQ ID NO: 738 - protein, 1345 aa, Streptococcus mutans; identical to SEQ ID NO: 737

SEQ ID NO: 739 - protein, 1355 aa, Streptococcus mutans
MKKSYSIGLDIGTNSVGWAVVTDDYKVPAKKMKVLGNTDKSHIKKNLLGALLFDSGNTAEDRRLKRTARRRYTRRRNRILYLQEIFSEEMGKVDDSFFHRLDESFLTDDDKNFDSHPIFGNKAEEDAYHQKFPTIYHLRKHLADSTEKADLRLVYLALAHMIKFRGHFLIEGELNAENTDVQKLFADFVGVYDRTFDDSHLSEITVDASSILTEKISKSRRLEKLINNYPKEKKNTLFGNLIALSLGLQPNFKTNFKLSEDAKLQFSKDTYEEDLEELLGKIGDDYADLFTLAKNLYDAILLSGILTADDSSTKAPLSASMIKRYAEHHEDLEKLKEFIKANKPELYHDIFKDETKNGYAGYIENGVKQDEFYKYLKNTLSKIAGSDYFLDKIEREDFLRKQRTFDNGSIPHQIHLQEMHAILRRQGDYYPFLKENQDRIEKILTFRIPYYVGPLARKNSRFAWAEYHSDEAVMPWNFDQVIDKESSAQAFIEHMTNNDLYLPNEKVLPKHSPLYEKYTVYNELTKIKYVTEIGEAKFFDANLKQEIFDGLFKHERKVTKKKLRTFLDKNFDEFRIVDIQGLDKETETFNASYATYQDLLKVIKDKVFMDNPENAEILENIVLTLTLFEDREMIKQRLAKYADVFDKKVIDQLARRHYTGWGRLSAKLLNGIRDKQSCKTIMDYLIDDAQSNRNLMQLITDDNLTFKDDIVKAQYVDNSDDLHQVVQSLAGSPAIKKGILQSLKIVDELVKVMGKEPEQIVVEMARENQTTAKGRRNSQQRYKRLKEAIKSLDRDLNHKILKEHPTDNQALQNNRLFLYYLQNGRDMYTGESLDINRLSDYDIDHVIPQAFIKDNSIDNRVLTSSKANRGKSDDVPSEDVVNRMRPFWNKLLSSGLISQRKYNNLTKKELTPDDKAGFIKRQLVETRQITKHVARMLDERFNKEFDDNNKRIRRVKIVTLKSNLVSSFRKEFELYKVREINDYHHAHDAYLNAVVVKALLVKYPKLEPEFVYGEYPKYNSYRERKTATQKMFFYSNIMNMFKSKVKLADDQIVERPMIEVNDETGEIAWDKTKHITTVKKVLSYPQVNIVKKVEEQTIGQNGGLFDDNPKSPLEVIPSKLVPLKKALNPEKYGGYQKPTTAYPILLIVDTKQLIPISVMDKKRFEQNPVKFLKDKGYQQIEKNNFVKLPKYTLVDIGNGIKRLWASSKEVHKGNQLVVSKKSQDLLYHAHHLDNDYSNEYVKNHYQQFDILFNEITSFSKKCKLGKEHIQKIEEAYSKERDSASIEELADGFIKLLGFTQLGATSPFSFLGIKLNQKQYTGKKDYLLPCMEATLIHQSITGLYETRIDLNKLGGD

SEQ ID NO: 740 - protein, 1355 aa, Streptococcus mutans; identical to SEQ ID NO: 739

SEQ ID NO: 741 - protein, 1125 aa, Streptococcus mutans
MTNGKILGLDIGIASVGVGIINAKTGNVEHASSRIFPAANADNNVERRSARGGRRLIRRKKHRLKRVEDLFEKYNIDTDFSNLNLNPYQLRVKGLNEQLSNEELFAILKNIAKRRGISYLDDAEDDSVGSSDYAKAIDENRKLLKKQTPGEIQLKRLEKYGQLRGNFTIQDENGEYHRLINVFSTSDYVKEARRILETQSYYNKFITESFVEDYIKILQGKRKYYVGPGNEKSRTDYGIYRTDGETLDNLFGILIGKCGFYPEEYRAAKASYTAQEYNFLNDLNNLTVPTETKKLSTEQKYQLVDFAKTASTLEAAKLLKEIAKLVGCQVEEIKGYRLDNKDKPDLHTFEPFRKLKSNLTTIAVENLSITTLDTLAHILTLNTEREGIEEAIQKELPNIFSDEQITGIIAVRKKNSQIFGKGWHSFSIKLMKELIPELYETSEEQMTILIRLKKVKTNSKITNRTKYINEQEVTDEIYNPVVSKSIRQTVKIINAAIKKYGAFDQIVIEMPRESNEEDERKFIADLQKSNAKEKDDAMKQAALLYNGKAELPHGVFHGHKELATKIRLWYQQGERCLYSGKHIDIHDLIHNQHMFEIDHVLPLSLSFDDSLANKVLVYSWANQEKGQRTPFQALPQMASAWSFRELRDYISKQKGISKKKRDYLLTEQDINKVEVKQKFIERNLVDTRYVSRVVLNTLQDALKVMNKETKISVIRGQFTSQLRRQWRIDKSRETYHHHAVDALIIAASSQLRLWKKQNNPMFAEDKHGQKINLDTGEVLSDDAYKELVYQAPYQGFVNTISSKSFEDEILFSYQVDSKVNRKISDATIYATRQAQLGKDKKEETYVLGKIKDIYSQAGYDAFRKKYDKDKAVFLMYQKDPETWEKVIEVILRDYKELDDKGKEIGNPFERYKVKHGFVRKYSRKNKGTEIKSLKYYDNKLGNHIDITPNNSKHSVVLQSINPWRADLYFNPETTKYELMGLKYADLSFEKGTGKYSISREKYDEIKEREGISSKSEFKFTLYKNDLILVKDIGNHKELIARFNSKNDTSKHYVELKPWNKAKFDSEEELIPAFGKVAKSGQFIKGLNKPDLSIYKVKTDILGHKYYIKKEGDKPKLNFENKIKNK

SEQ ID NO: 742 - protein, 1125 aa, Streptococcus mutans
MTNGKILGLDIGIASVGVGIINAKTGNVEHASSRIFPAANADNNVERRSARGGRRLIRRKKHRLKRVEDLFEKYNIDTDFSNLNLNPYQLRVKGLNEQLSNEELFAILKNIAKRRGISYLDDAEDDSVGSSDYAKAIDENRKLLKKQTPGEIQLKRLEKYGQLRGNFTIQDENGEYHRLINVFSTSDYVKEARRILETQSYYNKFITESFVEDYIKILQGKRKYYVGPGNEKSRTDYGIYRTDGETLDNLFGILIGKCGFYPEEYRAAKASYTAQEYNFLNDLNNLTVPTETKKLSTEQKYQLVDFAKTASTLGAAKLLKEIAKLVGCQVEEIKGYRLDNKDKPDLHTFEPFRKLKSNLTTIAVENLSITTLDTLAHILTLNTEREGIEEAIQKELPNIFSDEQITEIIAVRKKNSQIFGKGWHSFSIKLMKELIPELYETSEEQMTILTRLKKVKTNSKITNRTKYINEEEITDEIYNPVVSKSIRQTVKIINATIKKYGAFDQIIIEMPRESNEEDERKFIADLQKSNAKEKDDAMKQAALLYNGKDELPHDVFHGHKELATKIRLWYQQGERCLYSGKHIDIHDLIHNQHMFEIDHVLPLSLSFDDSLANKVLVYSWANQEKGQRTPFQALPQMASAWSFRELRDYISKQKGISKKKRDYLLTEQDINKVEVKQKFIERNLVDTRYVSRVVLNTLQDALKVMNKETKISVIRGQFTSQLRRQWRIDKSRETYHHHAVDALIIAASSQLRLWKKQNNPMFAEDKHGQKINLDTGEVLSDDAYKELVYQAPYQGFVNTISSKSFEDEILFSYQVDSKVNRKISDATIYATRQAQLGKDKKEETYVLGKIKDIYSQAGYDAFRKKYDKDKAVFLMYQKDPETWEKVIEVILRDYKELDDKGKEIGNPFERYKVKHGFVRKYSRKNKGTEIKSLKYYDNKLGNHIDITPNNSKHSVVLQSINPWRADLYFNPETTKYELMGLKYADLSFEKGTGKYSISREKYDEIKEREGISSKSEFKFTLYKNDLILVKDIGNHKELIARFNSKNDTSKHYVELKPWNKAKFDSEEELIPAFGKVAKSGQFIKGLNKPDLSIYKVKTDILGHKYYIKKEGDKPKLNFENKIKNK

SEQ ID NO: 743 - protein, 1125 aa, Streptococcus mutans; identical to SEQ ID NO: 742

SEQ ID NO: 744 - protein, 1125 aa, Streptococcus mutans; identical to SEQ ID NO: 741

SEQ ID NO: 745 - protein, 670 aa, Streptococcus oralis
MAKFNKNYSIGLDIGVSSVGYAVVTEDYRVPAFKFKVLGNTEKEKIKKNLIGSTTFVPAQSAQGTRVFRVNRRRIDRRNHRIAYLRDIFQKEIGKIDKNFYRRLDESFRVLGDKSEDIQIKQPFFGNKELETAYHKKYPTIYHLRKHLADADKNSPVADIREVYMALSHIFKYRGHFLTLGKIDPNNINMQNSWIDFIESCQDAFDLEISDESKTIAAIFKSSDNRQEKVKGILSYFQPELAKKDKSIFKQLLQLLFGLKTKFKECFELEEEPDLNFSKENYDENLENLLGTLEEDFPDVFAKLKILRDTILLSDMLTYTGATHARFSATMVERYEEHRKDLQRFKSFVKQNLSEQDYLDIFGRKTPNGFDVDKETKGYVGYISNKMVLTNKQKTIQQNFYDYISGKITGIEGAEYFLNKISDGTFLRKLRTTDNGTIPNQIHAYELEKIIERQGRDYPFLLENKDKLLSILTFKIPYYVGPLAKGNNSRFAWIKRTTSQDVLDNNDEDTKNGKIRPWNYHKLINMDETRDAFITNLIGNDIILLNEKVLPKRSLIYEEVMLQNELTRIKYKDKYGKIHFFDSELRQEIINNLFKTNSKRVSSAMLLAYLENFTNLQAVEIVSGIEKGKSLNSTLKTYNDLKTIFSEDLLDSEIYQKELEEIIKVITVFV

SEQ ID NO: 746 - protein, 1373 aa, Streptococcus oralis
MENKNYSIGLDIGTNSVGWAVITDDYKVPSKKMKVLGNTDKRFIKKNLIGALLFDEGTTAEARRLKRTARRRYTRRKNRLRYLQEIFAEEMSKVDSSFFHRLDDSFLIPEDKKGSKYPIFATLIEEKEYHKQFPTIYHLRKQLADSKEKTDLRLIYLALAHMIKYRGHFLYEDTFDIKNNDIQKIFNEFISIYNNTFEGNSLSGQNVQVEAIFTDKISKSAKRERVLKLFPDEKSTGLFSEFLKLIVGNQADFKKHFDLEEKAPLQFSRDTYDEDLENLLGQIGDDFADLFVAAKKLYDAILLSGILTVTDPSTKAPLSASMIERYENHQKDLATLKQFIKTNLPEKYDEVFSDQSKDGYAGYIDGKTTQESFYKYIKNLLSKFEGADYFLEKIEREDFLRKQRTFDNGSIPHQIHLQEMNAILRRQGEHYPFLKENKEKIEKILTFRIPYYVGPLARGNRDFAWLTRNSDQAIRPWNFEEIVDKASSAESFINKMTNYDLYLPEEKVLPKHSLLYETFAVYNELTKVKFIAEGLRDYQFLDSRQKKDIFYTLFKAEDKRKVTEKDIIQYLHTVDGYDGIELKGIEKQFNASLSTYHDLLKIIKDKEFMDDPNNEEILENIVHTLTIFEDREMIKQRLAQYDSLFDEKVIKALTRRHYTGWGKLSSKLINGIRDKQTGKTILDYLMDDGYNNRNFMQLINDDELSFKEIIKKAQVVGKTDDVKQVVQELPGSPAIKKGILQSIKLVDELVKVMGHEPESIVIEMARENQTTARGKKNSQQRYKRIEDSLKILASGLNAKILKEHPTDNIQLQNDRLFLYYLQNGRDMYTGKPLDINQLSSYDIDHIVPQAFIKDDSLDNRVLTSLKDNRGKSDNVPSLEVVEKMKTFWQQLLDSKLISYRKFNNLTKAERGGLDERDKVGFIKRQLVETRQITKHVAQILDARYNTEVNEKDKKNRTVKIITLKSNLVSNFRKEFRLYKIREINDYHHAHDAYLNAVVAKAILKKYPKLEPEFVYGDYQKYDLKRYISRSKDPKEIEKATEKYFFYSNLLNFFKEEVHYADGTIVKRENIEYSKDTGEIAWNKEKDFATIKKVLSLPQVNIVKKREVQTGGFSKESILPKGNSDKLIPRKTKDILWDTTKYGGFDSPVIAYSILLIADIEKGKAKRLKTVKTLVGITIMEKATFEKSPIAFLENKGYHNVRKENILCLPKYSLFELKNGRRRMLASAKELQKGNEIVLPVHLTTLLYHAKNIHRLDEPEHLEYIQKHRNEFKGLLNLVSEFSQKYVLADANLEKIKNLYADNEQADIEILANSFINLLTFTALGAPAAFKFFGKDVDRKRYTTVSEILNATLIHQSITGLYETRIDLSKLGED

SEQ ID NO: 747 - protein, 1371 aa, Streptococcus oralis
MENKNYSIGLDIGTNSVGWSVITDDYKVPSKKMKVLGNTDKRFIKKNLIGALLFDEGTTAEARRLKRTARRRYTRRKNRLRYLQEIFAEEMSKVDSSFFHRLDDSFLIPEDKRGSKYPIFATLAEEKEYHKQFPTIYHLRKQLADSKEKTDLRLIYLALAHMIKYRGHFLYEDTFDIKNNDIQKIFSEFISIYDNTFEGSSLSGQNAQVEAIFTDKISKSAKRERVLKLFPDEKSTGLFSEFLKLIVGNQADFKKHFDLGEKAPLQFSKDTYDEDLENLLGQIGDDFADLFLVAKKLYDAILLSGILTVTDPSTKAPLSASMIERYENHQKDLAVLKQFIKNNLPEKYDEVFSDQSKDGYAGYIDGKTTQEAFYKYIKNLLSKFEGTDYFLEKIEREDFLRKQRTFDNGSIPHQIHLQEMNAILRRQGEHYPFLKDNKEKIEKILTFRIPYYVGPLARGNRDFAWLTRNSDEAIRPWNFEEIVDKASSAEDFINKMTNYDLYLPEEKVLPKHSLLYETFAVYNELTKVKFIAEGLRDYQFLDSGQKKQIVTQLFKEKRKVTEKDIIQFLHNVDGYDGIELKGIEKQFNASLSTYHDLLKIIKDKEFMDDSKNEEILENIVHTLTIFEDREMIKQRLAQYDSLFDEKVIKALIRRHYTGWGKLSAKLIDGICDKQTGNTILDYLIDDGKNNRNFMQLINDDGLSFKEITQKAQVVGKTDDVKQVVQELPGSPAIKKGILQSIKIVDELVKVMGHTPESIVIEMARENQTTARGKKNSQQRYKRIEDALKNLASGLDSNILKEHPTNNIQLQNDRLFLYYLQNGRDMYTGKPLDINQLSSYDIDHIVPQAFIKDDSLDNRVLTSLKDNRGKSDNVPSIEVVQKRKAFWQQLLDSKLISERKFNNLTKAERGGLDERDKVGFIKRQLVETRQITKHVAQILDARFNKEVNEKDKKNRTVKIITLKSNLVSNFRKEFRLYKVREINDYHHAHDAYLNAVVAKAILKKYPKLEPEFVYGDYQKYDLKRYISRSRNPKEVEKATEKYFFYSNLLNFFKEEVHYADGTIVKRENIEYSKDTGEIAWNKEKDFATIKKVLSYPQVNIVKKREVQTGGFSKESILPKGNSDKLIPRKTKDILWETTKYGGFDSPVIAYSILLIADIEKGKAKKLKTVKTLVGITIMEKAAFEENPITFLENKGYHNVRKENILCLPKYSLFELENGRRRLLASAKELQKGNEIVLPVYLTTLLYHSKNVHKLDEPEHLEYIQKHRNEFKDLLNLVSEFSQKYVLADANLEKIQNLYADNEQADIEILANSFINLLTFTALGAPAAFKFFGKDIDRKRYTTVSEILNATLIHQSITGLYETRIDLSKLGED

SEQ ID NO: 748 - protein, 1121 aa, Streptococcus oralis
MNGLVLGLDIGIASVGVGILEKNSGKIIHANSRLFPAATADNNVERRKNRQARRLNRRKKHRGVRFQDLFEDYGLLTDFSKVSINLNPYRLRVDGLNQQLTNEELFIALKNIVKRRGISYLDDASEDGGAVSSDYGKAVEENRKLLAEQTPGQIQLERFEKYGQVRGDFTVVENGEKCRLINVFSTSAYRKEAEKILRKQQEFNNQITDEFIEDYLKILTGKRKYYHGPGNEKSRTDYGRFRTDGTTLDNIFGVLIGKCTFYPNEYRASKSSYTAQEFNLLNDLNNLTVPTETKKLSEEQKKVIVEYAKEAKTLGASTLLKYIVKMIDASVDQISGYRVDVNNKPEMHTFEVYRKMQSLETISVGELSRNVLDELAHILTLNTEREGIEEAINSKLMGVFSQDQVLELVQFRKNNSSLFSKGWHNFSLKLMMELIPELYETSEEQMTILTRLGKQKSKETSKRTKYIDEKELTEEIYNPVVAKSVRQAIKIINEATKKHGIFDNIVIEMARENNEEDAKKDYIKRQKANQDEKNAAMEKAAFQYNGKKELPGNIFNGHKELATKIRLWHQQGEKCLYTGKTIPISDLIHNQYKYEIDHILPLSLSFDDSLSNKVLVHATANQEKGQRTPFQALDSMDDAWSYREFKSYVKDLKSLSNKKKDYLLTEEDISKIEVKQKFIERNLVDTRYSSRVVLNALQDFYKSHQFDTTISVVRGQFTSQLRRKWGLEKSRETYHHHAVDALIIAASSQLRLWKKQNNPLITYKEGQFVDSQTGEIISLTDDEYKELVFKAPYDHFVDTLHSKTFEDGILFSYQVDSKYNRKISDATIYATRKAKLDKDKSEETYVLGKIKDIYSQAGYDAFIKIYNKDKRKFLMYHKDPQTFEKVIEEILRTYPSKERNDKNKEVPCNPFEKYRQENGPIRKYSKKGNGPEIKCLKYYDNKLGNYIDISPDGSDNQVVLQSLKPWRTDVYFNHQTKEYELMGLKYSDLSFEKGSGKYSISNEKYNSIKRIEGVNEQSEFKFTLYKNDLILIKDSENNEQKLFRFNSRNDTAKHYVELKPYDKARFDGQQELITILGNVAKGGQCLKGLNKSNISIFKVKTDVLGKKHIIKKEGDEPKLKF

SEQ ID NO: 749 - protein, 1134 aa, Streptococcus oralis
MNGLVLGLDIGIASVGVGILEKNSGKIVHASSRIFPAATADNNVERRKNRQARRLHRRKKHRGARLKDLFEYYGLLTDFSKVSINLNPYRLRVDGLDQQLTNEELFIALKNIVKRRGISYLDDASEDGGTVSSDYGKAVEENRKLLAEQTPGQIQLERFEKYGQLRGDFTVVENSEKCRLINVFSTSAYKKEAERILRKQQEFNNQITDEFIEDYLKILTGKRKYYHGPGNEKSRTDYGRFRTDGATLDNIFGILIGKCTFYPNEYRASKASYTAQEFNLLNDLNNLTVPTETKKLSEEQKKTIIEYAKSAKTLGASTLLKYIAKMIDASVDQIRGYRVDVNNKPEMHTFEVYRKMQSLETISVGELSRNILDELAHILTLNTEREGIEEAINTKLRDSFSQDQVLELVQFRKNNSSLFSKGWHNFSLKLMMELIPELYETSEEQMTILTRLGKQKSKETSKRTKYIDEKEVTEEIYNPVVAKSVRQAIKIINEATKKHGIFDNIVIEMARENNEEDAKKDYIKRQKANQDEKYAAMEKAAFQYNGKKELPDNIFHGHKELATKIRLWHQQGEKCLYTGKSIPISDLIHNQYKYEIDHILPLSLSFDDSLSNKVLVLATANQEKGQRTPFQALDSMDDAWSYREFKSYVKESKLLGNKKKEYLLTEEDISKIEVKQKFIERNLVDTRYSSRVVLNALQDFYKNHNFDTTISVVRGQFTSQLRRKWGLEKSRETYHHHAVDALIIAASSQLRLWKKQNNPLIAYKEGQFVDSQTGEIISLTDDEYKELVFKAPYDHFVDTLSSKTFEDSILFSYQVDSKFNRKISDATIYATRKAKLDKEKKEYTYTLGKIKDIYSLGTKTPSKTGFYKFLDLYNKDKSQFLMFQKDRKTWDEVIEKIMEQYRPFKEYDKAGKLVDFNPFEKYRQENGPIRKYSKKGNGPEIKSLKYYDILLGKHKNITPEGSRNTVALLSLNPWRTDVYYNMETKKYEFLGLKYADLPFEEGGAYGISTETYNELREKEGIGKNSEFKFTLYKNDLILIKDTETNCQQFFRFWSRTGKDNPKSFEKHKIELKPYEKAKFEKGEELEVLGKVPPSSNQFQKNMQIENLSIYKVKTDVLGNKHFIKKEGDKPKLKF

SEQ ID NO: 750 - protein, 550 aa, Streptococcus oralis
MYSLDKNGSPTPLYRDQLNQYEVDHIIPYSFLPIDSIDNKVLTHRENNQRKLDNIPDKETVANMKPFWEKLYNAKLISQTKYQRLTTSERTPDGVLTESMKAGFIERQLVETRQIIKHVARILDNRFSDTKIITLKSQLVTNFRNTFHIAKIRELNDYHHAHDAYLAVVVGQTLLKAYPKLAPELIYGHHAHFNRHEENKATIRKYLYSNIMRFFNNPDSKVSKDIWDCNRDLPIIKDIIYNSQVNFVKRTMIKKGAFYNQNPVGKFNKQIAANNRYPLKTKVSSLDTSIYGGYGPMNSALSIIIIAERFNEKKCKIETVKEFHDIFIIDYKKFNNDPFQFLNDTSENGFLKKNNINRVLAFYRVPKYSLMQKIDGTRMLFESKSNLHKATQFKLTKTQNELFFHMRRLLTKSNLMDLKSESAIKESQNFILKHKEEFDNISNQLSAFSQKMLGDTTSLKNLIKGYNERKIKEINSSEETIKYFYDNFIKMFSFVKSGAPKDINDFFNNKYTVARMRPKPDKKLLNATLIHQSITGLYETRIDLSKLGED

SEQ ID NO: 751 - protein, 1140 aa, Streptococcus parasanguinis
MNGLVLGLDIGIASVGVGILKKDIGEIIHTNSRLFSAATADSNIERRGHRGGKRLTRRKKHRSIRLHDLFEDFGLLTDFSKVSINLNPYQLRVQGLDNQLTNEELFIALKNIVKRRGISYLDDASEDGGTVSSDYGKAVEENRKLLAEQTPGQIQLDRFEKYGQVRGDFNVVENGEKRRLINVFTTSAYSKEAERILRKQQEFNKKITDEFIEDYLTILTGKRKYYHGPGNEKSRTDYGRYTTKKDPEGKYITLDNIFGILIGKCTFYPDEYRASKASYTAQEFNLLNDLNNLTVPTETKKLSEEQKKTIIKYAKTAKTLGASTLLKYIAKLIGASVDQIHGYRIDPNKKPEMHTFETYRKMQSLETISVEELPRKVLDELAHILTLNTEREGIEEAINATLKDTFSQDQVLELVQFRKNNSSLFSKGWHSFSLKLMMELIPELYETSEEQMTILTRLGKQKSKETSKRTKYIDEKELTEEIYNPVVAKSVRQAIKIINEATKKYGIFDNIVIEMARENNEEDAKKEYIKRQKANLDEKNAAMEKAAFQYNGKKELPDNVFHGHKELATKIRLWHQQGEKCLYTGKNIPISDLIQNQYKYEIDHILPLSLSFDDSLSNKVLVLATANQEKGQRTPFQALDSMDDAWSYREFKSYVKDSKLLGNKKKEYLLTEEDISKIEVKQKFIERNLVDTRYSSRVVLNALQDFYKEHQFDTTISVVRGQFTSQLRRKWGLEKSRETYHHHAVDALIIAASSQLRLWKKQNNPLISYTEGQFVDQVTGEIISLSDDEYKELVFKAPYDHFVDTLKSKKFEDSILFSYQVDSKYNRKISDATIYATRKAKLDKENKEYTYTLGKIKDIYALGTKSPSKTGFYKFLDLYNKDKSQFLMFQKDRKTWDEVIEKIIEQYRPFKEYDENGKEVDFNPFEKYRIENGPIRKYSKKGNGPEIKSLKYYDNLLGKFVDITPSESKNPVALLSLNPWRTDVYYNTETSKYEFLGLKYADLCFEKGGAYGISEVKYNKIREKEGIGKESEFKFTLYKNDLILIKDTETNCQQIFRFWSRTGKDNPKSFEKHKIELKPYEKARFEKGEELEVLGKVPPSSNQLQKNMQIENLSIYKVKTDVLGNKHFIKKEGEEPKLKF

SEQ ID NO: 752 - protein, 1374 aa, Streptococcus pseudoporcinus
MKKRYSYSIGLDIGTNSVGWAVINEDYKVPAKKMTVFGNTDRKTIKKNLLGTVLFDSGETAQARRLKRTNRRRYTRRRYRLCQLQNIFATEMVKVDDTFFQRLSESFFYYQDKAFDKHPIFGNSKEERAYHKTYPTIYHLRKDLADRDQKADLRLIYLALSHIIKFRGHFLIEGKLNSENTDVQKLFIALVTVYNLLFEEEPIAGETCDAKALLTAKTSKSKRLESLISEFPGQKKNGLFGNLLALALGLRPNFKSNFGLSEDAKLQITKDTYEEELDNLLAEIGDHYADLFLAAKNLSDAILLSDILTLSDENTRAPLSASMIKRYEEHQEDLALLKKLVKEQMPEKYWEIFSNAKKNGYAGYIEGKVSQEDFYRYIKPILSRLKGGDEFLAKIDRDDFLRKQRTFDNGSIPHQIHLKELHAILRRQEKYYPFLAEQKEKIEQLLCFRIPYYVGPLAKGGNSSFAWLKRRSDEPITPWNFKDVVDEEASAQAFIEGMTNYDTYLPEEKVLPKHSPLYEMFTVYNELTKVKYIAENMTKPLYLSAEQKEAIIDHLFKQTRKVTVKDLKEKYFSQIEGLENVDVTGVEGAFNASLGTYNDLLKIIKDKAFLDDEANAEILEEIVLILTLFQDEKLIEKRLAKYANLFEKSVLKKLRKRHYRGWGRLSRQLIDGMKDKASGKTILDFLKADDFANRNFIQLINDSSLDFEKLIDDAQKKAIKRESLTEAVANLAGSPAIKKGILQSLKVVDEIVKVMGHNPDNIVIEMSRENQTTAQGLKNARQRLKKIKEVHKKTGSRILEDNSERITNLTLQDNRLYLYLLQDGKDMYTGQDLDINNLSQYDIDHIIPQSFIKDNSIDNLVLTTQKANRGKSDNVPSIEVVRDMKDRVWRRQLANGAISRQKFDHLTKAERGGLADSDKARFLRRQLVETRQITKHVAQLLDSRFNSKSNQNKKLARNVKIITLKSKIVSDFRKDFGLYKLREVNNYHHAHDAYLNAVVGTALLKKYPKLEAEFVYGDYKHFDLVKLISKSDPSLGKATAKVFFYSNIMNFFKEELSLADGTLMKRPVIETNTETGEVVWDKVKDFKTIRKVLSYPQVNIVKKTEIQSGAFSKESVLSKGNSDKLIERKKGWDPKKYGGFDSPNTAYSIFVVAKVAKRKAQKLKTVKEIVGITIMEQAEYEKDNIAFLEKKGYQDIQEKLLIKLPKYSLFELENGRRRLLASANEFQKGNELALSGKYMKFLYLASRYDKLSSKIESEQQKKLFVEQHLHYFDEILDIVVKHATCYIKAENNLKKIISLYKKKEAYSINEQALNMLNLFIFTSLGAPSTFVFFDETIDRKRYTTSSDVLNGILIQQSITGLYETRIDLSRFGGD

SEQ ID NO: 753 - protein, 1052 aa, Streptococcus pyogenes
LSASMIKRYDEHHQDLTLLKALVRQQLPEKYKEIFFDQSKNGYAGYIDGGASQEEFYKFIKPILEKMDGTEELLAKLNREDLLRKQRTFDNGSIPHQIHLGELHAILRRQEDFYPFLKDNREKIEKILTFRIPYYVGPLARGNSRFAWMTRKSEETITPWNFEEVVDKGASAQSFIERMTNFDKNLPNEKVLPKHSLLYEYFTVYNELTKVKYVTEGMRKPAFLSGEQKKAIVDLLFKTNRKVTVKQLKEDYFKKIECFDSVEISGVEDRFNASLGTYHDLLKIIKDKDFLDNEENEDILEDIVLTLTLFEDREMIEERLKTYAHLFDDKVMKQLKRRRYTGWGRLSRKLINGIRDKQSGKTILDFLKSDGFANRNFMQLIHDDSLTFKEDLQKAQVSGQGDSLHEHIANLAGSPAIKKGILQTVKVVDELVKVMGRHKPENIVIEMARENQTTQKGQKNSRERMKRIEEGIKELGSDILKEYPVENTQLQNEKLYLYYLQNGRDMYVDQELDINRLSDYDVDHIVPQSFLKDDSIDNKVLTRSDKNRGKSDNVPSEEVVKKMKNYWKQLLNAKLITQRKFDNLTKAERGGLSELDKAGFIKRQLVETRQITKHVAQILDSRMNTKYDENDKLIREVRVITLKSKLVSDFRKDFQFYKVREINNYHHAHDAYLNAVVGTALIKKYPKLESEFVYGDYKVYDIRKMIAKSEQEIGKATAKYFFYSNIMNFFKTEITLANGEIRKRPLIETNGETGEIVWDKGRDFATVRKVLSMPQVNIVKKTEVQTGGFSKESILPKRNSDKLIARKKDWDPKKYGGFDSPTVAYSVLVVAKVEKGKSKKLKSVKELVGITIMERSSFEKDPVDFLEAKGYKEVRKDLIIKLPKYSLFELENGRKRMLASAGELQKGNELALPSKYVNFLYLASHYEKLKGSPEDNEQKQLFVEQHKHYLDEIIEQISEFSKRVILADANLDKVLSAYNKHRDKPIREQAENIIHLFTLTNLGAPAAFKCFDTTIGRNRYKSIKEVLDATLIHQSITGLYETRIDLSQLGGD

SEQ ID NO: 754 - protein, 1368 aa, Streptococcus pyogenes; identical to SEQ ID NO: 42

SEQ ID NO: 755 - protein, 1367 aa, Streptococcus pyogenes; identical to SEQ ID NO: 246

SEQ ID NO: 756 - protein, 1368 aa, Streptococcus pyogenes [sequence omitted]

SEQ ID NO: 757 - protein, 1370 aa, Streptococcus ratti
MKKPYSIGLDIGTNSVGWAVITDDYKVPAKKMKVLGNTDKNYIKKNLLGALLFDSGNTAEDRRLKRTARRRYTRRRNRLLYLQDIFSDEMNKVDESFFHRLEDSFLVSEDKRGDHHPIFGNVVDEVKYHEQFPTIYHLRKYLADTPEKADLRLVYLALAHMIKFRGHFLIDDPKLDVKNTDSQELFSQFLTAYDVTQEDSHLADVKINISDIITEKMNKSRKVEALLFHFPSQKKNSFFGNLVSLVFGLLPNFKTNFNLAEDAKLQLSKDSYDEDLENLLGQIGDEYTDVFVAARKLYDSILLSGILTVNDLSTKAILSASMVRRYEEHNKDLAKLKAFVKANFTHDVFKEVFSDASKNGYAGYIEGKTSQEDFYKYVKNLIGKVDGSADFIEKIDREDFLRKQRTFDNGSIPHQVHLAEMKAILRRQGEYYPFLKEHAEKIQQILTFRIPYYVGPLDRHGHSDFAWASFNSEEKVTPWNFEEIIDKNKSAQAFIERMTNQDLYLPNEKVLPKHSPLYEKYTVYNELTKIKYVTETGTAKFFDANLKQEIFDGLFKKERKVTKRKLLTFLEKNFDEFRIVDIQGLDKETETFNASYGIYQDLLKIIKDKAFMDDSENADILEDIVLTLTLFEDREMIKQRLAKYADLFDKKVIDNLARRRYTGWGRLSAKLLNGIRDKRSRKTIMDYLVDDGRSNRNLMQLITDDNLTFKDEIAKAQYSDNSDDLHQVVQDLAGSPAIKKGILQSVKIVDELVKVMGYEPEQIVVEMARENQTTAKGRRNSQQRYKRLEEAIKNLDRDLNYKILKEHPTDNQALQNDRLFLYYLQNGRDMYTGESLDINRLSDYDIDHIIPQAFIKDNSIDNRVLVSSAKNRGKSDDVPSEDVVNRMRPFWNKLLNCGLISQRKYSNLTKKELTPNDKAGFIKRQLVETRQITKHVARILDEHFNKEFDEDKKRIRKVKVVTLKSNLVSNFRKEFELYKVREINDYHHAHDAYLNAVVAKALLMKYPKLEPEFVYGEYPKYNSYRERKTATQRMFFYSNIMNMFKSKVKLADERIIERPMIEVNDETGEIAWDKTKHIATVKKVLSYPQINIVKKVEEQTGGLTNETIYPRGSFDKLLNRKNTLEASKYGGFGSPTVAYCVLVVADSKNENGKVKKLKLGSELLGITILEKNDFENNSLDFLSRKGYQGVQEKKIIKLPKYSLFEFQDGSRRMLSSVMANDNKRGDLQKANEMILPAYLVKLLYHAKHINSVGEPAHKNYINEHCSEFQDLLNYIRQFADKFVDVDKNLSKIRSLSKSMAEYSVSEICSSFVNLLTLTALGAPADFKFFGTTIPRKRYGSPQSILSATLIHQSITGLYETRIDLSKLGED

SEQ ID NO: 758 - protein, 1135 aa, Streptococcus salivarius
MSDLVLGLDIGIGSVGVGILNKVTGEIIHKNSRIFPAAQAENNLERRTNRQGRRLTRRKKHRRVRLNHLFEESGLITDFTKVSINLNPYQLRVKGLTAELSNEELFIALKNMVKHRGISYLDDASDDGNSSVGDYAQIVKENSKQLETKTPGQIQLERYQKYGQLRGDFTVEEDGRKHRLINVFPTSAYHAEALRILQTQQEFNPQITDEFINSYLEILTGKRKYYHGPGNEKSRTDYGKYTTKKDAQGQYITLNNIFGILIGKCTFYPEEYRAAKASYTAQEFNLLNDLNNLTVPTETKKLSEEQKYQIITYVKNEKAMGPAKLFKYIAKLLACDIADIKGYRIDKSDKAEIHTFEAYRKMKTLETIDIEQIEREKLDKLAYVLTLNTEREGIQEALDHEFADGTFSQEQVDELVQFRKANSSIFGKGWHSFSVKLMMELIPELYATSEEQMTILTRLGKQKTTSSSNKTKYIDEKQLTEEIYNPVVAKSVRQAIKIVNAAIKKYGDFDNIVIEMARETNEDDEKKAIQKIQKANKAEKDAAMRKAANQYNGKAELPHSVFHGHKQLATKIRLWHQQGERCLYTGKTISIHDLINNPNQFEIDHILPLSITFDDSLANKVLVYATANQEKGQRTPYQALDSMDDAWSFRELKAFVRESKALSNKKKEYLLTEEDISKFDVRKKFIERNLVDTRYASRVVLNALQEHFKAHKIDTKVSVVRGQFTSQLRRHWGIDKTRDTYHHHAVDALIIAASSQLNLWKKQKNTLVSYSEDQLLDIETGELISDDEYKESVFKAPYQHFVDTLKSKEFEDSILFSYQVDSKFNRKISDATIYATRQAKVGKDKKDETYVLGKIKDIYALGTKTPSKTGFYKFLDLYNKDKSQFLVYQKDRKTWDEVIEKIMEQYRPFKESDKNGKEVDFNPFEKYRIENGPIRKYSRKGNGPEIKSLKYYASKLGNHIDITPKDSNNKVVLQSVSPWRADVYFNKTTGSYEILGLKYADLQFEKGTGTYRISEEKYNDIKKKEGVDSDSEFKFTLYKNDLLLIKDTETKEQRLFRFLSRSMPNKKHYVELKPYSKDKFEKNESLIEILGSADKSGRCIKGLAKSNLSIFKVRTDVLGNQHIIKNEGDKPKLDF

SEQ ID NO: 759 - protein, 1127 aa, Streptococcus salivarius
MSDLVLGLDIGIGSVGVGILNKVTGEIIHKNSRIFPAAQAENNVERRINRQGRRLTRRKKHRRVRLNHLFEESGLITDFTNVSINLNPYQLRVKGLTDELSNEELFIALKNMVKHRGISYLDDASDDGNSSVGDYAQIVKENSKQLETKTPGQIQLERYQKYGQLRGDFTVEEDGKKHRLINVFPTSAYRAEALRILQTQQEFNPQITDEFINSYLQILTGKRKYYHGPGNEKSRTDYGRYTTKKDSEDEYITLDNIFGILIGKCTFYPEEYRAAKASYTAQEFNLLNDLNNLTVPTETKKLSEEQKNQIITNVKNEKAMGPAKLFKYIAKLLSCDVADIKGYRIDKSDKAEIHTFEAYRKMKTLATIDIEQMERENLDKLAYVLTLNTEKEGIQEALEHEFADGTFSQEQIDELVQFRKANSSIFGKGWHSFSVKLMMELIPELYATSEEQMTILTRLGKQKTTSSSNKTKYIDEKQLTEEIYNPVAAKSVRQAIKIVNAAIKEYGDFDNIVIEMARETNEDDEKKAIQKIQKANKDEKDAAMLKAANQYNGKAELPHSVFHGHKQLATKIRLWHQQGERCLYTGKTISIHDLINNSNQFEIDHILPLSITFDDSLANKVLVYATANQEKGQRTPYQALDSMDDAWSFRELKAFVRDSKALSNKKKEYLLTEEDISKFDVRKKFIERNLVDTRYASRVVLNALQEHFRVHKTDTKVSVVRGQFTSQLRRHWGIEKTRDTYHHHAVDALIIAASSQLNLWKKQKNTLVSYSEDQLLDIETGELISDDEYKESVFKAPYQHFVDTLKSKEFEDSILFSYQVDSKFNRKISDATIYATRQAKVGKDKKDETYVLGKIKDIYSQTGYDAFIKIYKKDKSKFLMYRHDPQTFEKVIEPILENYPNKELNEKGKEVPCNPFLKYKEDHGYIRKYSKKGNGPEIKSLKYYDSKLGNHIDITPKNSNNKVVLQSVSPWRADVYFNKTTGKYEILGLKYADLKFEKGTGTYKISEEKYNDIKIKEGVDSDSEFKFTLYKNDLLLIKDTETKEQQLFRFLSRTMPNVKHYVELKPYDKQKFDDNEELIKILGIVAKGGQCKKGVSKPNISIYKIRTDVLGNQHIIKNEGDKPKLDF

SEQ ID NO: 760 - protein, 1385 aa, Streptococcus salivarius
MTKPYSIGLDIGTNSVGWAVITDDYKVPSKKMKVLGNTSKKYIKKNLLGALLFDSGITAEGRRLKRTARRRYTRRRNRILYLQEIFSTEMATLDDAFFQRLDDSFLVPDDKRDSKYPIFGNLVEEKVYHDEFPTIYHLRKHLADSSKKADLRLVYLALAHMIKYRGHFLIEGDFNSKNNDLQKNFQDFLDTYNAIFESDLSLENSKQLEEIVKDKISKSAKKDRILKLFPGEKNSGIFSEFLKLIVGNQADFRKYFNLDEKTSLQFSKESYDEDLETLLGHIGDDYSDVFLKAKKLYDAILLSGILTVTDNGTEAPLSSAMIMRYKEHEEDLALLKAYIRNISLETYNEVFKDNTKNGYAGYIDGKTSQEDFYVYLKRLLAGLEGADYFLEKIDREDFLRKQRTFDNGSIPYQIYLQEMRAILDKQAKFYPFLAKNKERIEKILTFRIPYYVGPLARGNSDFAWSIRKRNEKITPWNFEDVIDKESSAEAFINRMTSFDLYLPEEKVLPKHSLLYENFTVYNELTKVRFIAEGMRDYQFLDSKQKKDIVRLYFKGKRKVTDKDIIEYLHAIDGYDGIELKGIEKQFNSSLSTYHDLLNIINDKEFLDDSSNETIIEEIIHTLTMFEDREMIKQRLSKFDNIFDKSVLKKLSRRHYTGWGKLSAKLINGIRDEKSGNTILDYLIDDGVSNRNFMQLIHDDALSFKKKIKKAQIIGDKDNIKQVVKSLPGSPAIKKGILQSIKIVDELVKVMGREPESIVVEMARENQYTNQGKSNSQQRLKRLEESLKGLGSKILKENVPTRLSKIDNNALQNDRLYLYYLQNGKDMYTGEELDIDRLSNYDIDHIIPQAFLKDDSIDNKVLVSSASNRGKSDDVPSLEVVKKRKTLWYQLLKSKLISQRKFDNLTKAERGGLSQEEKAGFIQRQLVETRQITKHVARLLDERFNNKKDENNRTLRTVKIITLKSSLVSQFRKDFELYKVREINDFHHAHDAYLNAVVASALLKKYPKLEPEFVYGDYPKYNSFRERKSATEKVYFYSNIMNIFKKSIPLADGTVIDRPLIEVNEETGESVWNKVADLNTVRKVLSYSQVNIVKKVEEQNHGLDRGKPKGLFNANLSSKPKPNSKENLVGAKEYLDPKKYGGYAGISNSFAILVKGTIEKGAKKKITNVLEFQGISILDRIYYRKDKLNFLLEKGYKDIELIIELPKYSLFELSDGSRRMLASILSTNNKRGEIHKGNQIFISQKFVKLLYHAKRISSTFNENHRKYVENHKKEFEELFYYILEFNENYVGAKKNGELLKSAFQSWQNHSIDELCSSFIGPTGSERKGLFELTSRGGAADFEFLGVKIPRYRDYTPSSLLKDATLIHQSVTGLYETRIDLGKLGED

SEQ ID NO: 761 - protein, 1392 aa, Streptococcus sanguinis
MENKNYSIGLDIGTNSVGWAVITDDYKVPSKKMKVFGNTDKHFIKKNLIGALLFDEGATAEDRRLKRTARRRYTRRKNRLRYLQEIFSEEISKLDSSFFHRLDDSFLVPKDKRGSKYPIFATLEEEKEYHKKFPTIYHLRKHLADSKEKTDLRLIYLALAHMIKYRGHFLYEESFDIKNNDIQKIFNEFISIYDNTFEGSSLSGQNAQVEAIFTDKISKSAKRERVLKLFSDEKSTSLFSEFLKLIVGNQADFKKHFDLEEKAPLQFSKDTYDEDLENLLGQIGDGFTDLFLVAKKLYDAILLSGILTVTDPSTKAPLSASMIERYESHQKDLAALKQFIKNNLPKRYNEVFSDQSKDGYAGYIDGKTTQEAFYKYIKNLLSKFEGADYFLDKIEREDFLRKQRTFDNGSIPHQIHLQEMNAILRRQGEHYPFLKENREKIEKILTFRIPYYVGPLARGNRDFAWLTRNSDQAIRPWNFEEIVDKASSAEEFINKMTNYDLYLPEEKVLPKHSLLYETFAVYNELTKVKFIAEGLRDYQFLDSGQKKQIVNQLFKEKRKVTEKDIIHYLHNVDGYDGIELKGIEKQFNASLSTYHDLLKIIKDKEFMDDPKNEEILENIVHTLTIFEDREMIKQRLAQYDSIFDEKVIKALTRRHYTGWGKLSAKLINGICDKQTGDTILDYLIDDGKINRNFMQLINDDGLSFKEIIQKAQVVGKTDDVKQVVQELPGSPAIKKGILQSIKIVDELVKVMGYAPESIVIEMARENQTTARGKKNSQQRYKRIEDSLKNLAPGLDSNILKENPTDNIQLQNDRLFLYYLQNGKDMYTGKPLDIDQLSSYDIDHIIPQAFIKDDSIDNRVLTSSKDNRGKSDNVPSLEVVQKRKAFWQQLLDSKLISERKFNNLTKAERGGLDERDKVGFIRRQLVETRQITKHVAQILDASFNTEVNEKNQKIRTVKIITLKSNLVSNFRKEFELYKVREINDYHHAHDAYLNAVVAKAILKKYPKLEPEFVYGDYQKYDLKRYISRFKPSKEIEKATEKYFFYSNLLNFFKEEVHYADGIIVKRENIEYSKDTGEIAWNKEKDFATIKKVLSYPQVNIVKKTEIQTHGLDRGKPKGLFNSNPSPKPSEDSKENLVPIKQGLDPRKYGGYAGISNSYAVLVKAIVEKGAKKQQKTILEFQGISILDKINFENNKENYLLKKRYIEILSTITLPKYSLFEFPDGTRRRLASILSTNNKRGEIHKGNELVLPGKYTTLLYHAKNINKKLEPEHLEYVEKHRNDFAKLLECVLNFNDKYVGALKNGERIRQAFTDWETVDIEKLCFSFIGPENSKNAGLFELTSQGSASDFEFLGVKIPRYRDYAPSSLLKATLIHQSITGLYETRIDLSKLGED

SEQ ID NO: 762 - protein, 1377 aa, Streptococcus sanguinis
MKKPYSIGLDIGTNSVGWAVITDDYKVPSKKMKVLGNTDKHFIKKNLIGALLFDEGTTAEDRRLKRTSRRRYTRRKNRLRYLQEIFSEEISKLDSSFFHRLDDSFLVPEDKRGSKYPIFATLEEEKEYHKKFPTIYHLRKHLADSKEKTDLRLIYLALAHMIKYRGHFLYEESFDIKNNDIQKIFNEFISIYDNTFEGSSLSGQNAQVEAIFTDKISKSTKRERVLKLFSDEKSTGLFSEFLKLIVGNQADFKKHFDLEEKAPLQFSKDTYDEDLENLLGQIGDGFADLFLVAKKLYDAILLSGILTVTDPSTKAPLSASMIERYENHQEDLAALKQFIKNNLSEKYAEVFSDQSKDGYAGFIDGKTTQEAFYKYIKNLLSKLEGADYFLNKIEREDFLRKQRTFDNGSIPHQIHLQEMNAILRRQGEHYLFLKENREKIEKILAFRIPYYVGPLARGNRDFAWLTRNSDQAIRPWNFEEVVDKASSAEDFINKMTNYDLYLPEEKVLPKHSLLYETFAVYNELTKVKFIAEGLRDYQFLDSGQKKQIVNQLFKDKRKVTEKDIIHYLHNVDGYDGIELKGIEKQFNASLSTYHDLLKIIKDKEFMDNPKNGEILENIIHTLTIFEDREMIKQRLAQYDTLFDEKVIKALTRRHYTGWGKLSAKLINGIRDKQTGKTILEYLIDDGDCNRNFMQLINDDGLSFKEIIQKAQVVGKTDDVKQVVQEIPGSPAIKKGILQSIKIVDELVKVMGHNPESIVIEMARENQTTAKGKKNSQQRYKRIEDALKNLAPGLDSNILKENPTDNIQLQNDRLFLYYLQNGKDMYTGKAIDINQLSNYDIDHIIPQAFIKDDSLDNRVLTSSKDNRGKSDNVPSIEVVQKRKAFWQQLLDSKLISERKFNNLTKAKRGGLDERDKVGFIKRQLVETRQITKHVAQLLDTRFNTEVNEENQKIRTVKIITLKSNLVSNFRKEFGLYKVREINDYHHAHDAYLNAVVAKAILKKYPKLEPEFVYGDYQKYDLKRYILKSKASNTIDKATEKYFFYSNLLNFFKEKVRYADGTIKKRENIEYSNDTGEIAWNKEKDFATIKKVLSLPQVNIVKKTEEQTVGQNGGLFDNNIVSKKKVVDASKLIPIKSSLSPEKYGGYARPTIAYSVLVIADIEKGKGKAKKLKRIKEIVGITIQDKKKFESNPVTYLEECGYKNINSNLIIKLPKYSLFEFNDGQRRLLASSIELQKGNELILPYHLTALLYHAQRINKISEPIHKQYVEAHQNEFKELLTTIISLSKKYIQKPNVELLLQQAFDQADKDIYQLSESFISLLKLTSFGAPGAFKFLGVEISQSSVRYKPNSQFLDTTLIHQSITGLYETRIDLSKLGED

SEQ ID NO: 763 - protein, 1370 aa, Streptococcus sanguinis
MKKPYSIGLDIGTNSVGWAVVTDDYKVPAKKMRVFGDTDRSHIKKNLLGTLLFDDGNTAESRRLKRTARRRYTRRRNRILYLQEIFTESMNEIDESFFHRLDDSFLVPEDKRGSKYPIFATLQEEKEYHKQFPTIYHLRKQLADSKEKSDVRLIYLALAHMIKYRGHFLYEETFDIKNNDIQKIFNEFINIYDNTFEGSSLSGQNAQVEAIFTDKISKSAKRERVLKLFPDEKSTGLFSEFLKLIVGNQADFKKHFDLEEKAPLQFSKDTYDEELENLLGQIGDDFADLFLIAKKLYDAILLSGILTVTDPSTKAPLSASMIERYENHQKDLAALKQFIKNNLPEKYVEVFSDQSKDGYAGYIDGKTTQEAFYKYIKNLLSKFEGADYFLDKIEREDFLRKQRTFDNGSIPHQIHLQEMNAILRRQGEHYPFLKENREKIEKILTFRIPYYVGPLARDNRDFSWLTRNSDEPIRPWNFEEVVDKARSAEDFIHRMTNYDLYLPEEKVLPKHSLLYETFAVYNELTKVKFIAEGLRDYQFLDSGQKKQIVNQLFKEKRKVTEKDIIHYLHNVDGYDGIELKGIEKQFNANLSTYHDLLKITKDKEFMDDPKNEEILENIVHTLTIFEDREMIKQRLAQYDTLFDEKVIKALTRRHYTGWGKLSAKLINGIRDKQSGKTILDYLIDDDKINRNFMQLINDDGLSFKEIIQKAQVVGKTDDVKQVVQELPGSPAIKKGILQSIKIVDELVKVMGYALESIVIEMARENQTTARGKKNSQQRYKRIEDALKNLAPGLDSNILKENPTDNIQLKNDRLFLYYLQNGKDMYTGKPLDINQLSSYDIDHIIPQAFIKDDSIDNRVLTSSKDNRGKSDNVPSLEVVQKRKAFWQQLLDSKLISERKFNNLTKAERGGLDERDKVGFIRRQLVETQQITKNVAQILDARFNTEVKEKNQKIRTVKIITLKSNLVSNFRKEFGLYKVREINNYHHAHDAYLNAVVAKAILKKYPKLEPEFVYGDYQKYDLKKYISRFKPSKEIEKATEKYFFYSNLLNFFKEEVLYADGTIRKRENIEYSKDTGEIAWDKEKDFATIKKVLSYPQVNIVKKREVQTGGFSKESILPKGNSDKLIPRKTKDILWDTTKYGGFDSPVIAYSILLIADIEKGKAKKLKTVKTLVGITIMEKAAFEENPITFLENKGYHNVRKENILCLPKYSLFELENGRRRLLASAKELQKGNEIVLPVCLTTLLYHSKNLHKLDEPEHLEYIQKHRNEFKDLLNLVSEFSQKYILAEANLEKIKDLYADNEQADIEILANSFINLLTFTALGAPAAFKFFGKDVDRKRYTTVSEILNATLIHQSITGLYETRIDLSKLGEE

SEQ ID NO: 764 - protein, 1421 aa, Streptococcus sanguinis
MTKFNKNYSIGLDIGVSSVGYAVVTEDYRVPAFKFKVLGNTEKEKIKKNLIGSTTFVSAQPAKGTRVFRVNRRRIDRRNHRITYLRDIFQKEIEKVDKNFYRRLDESFRVLGDKSEDLQIKQPFFGDKELETAYHKKYPTIYHLRKHLADADKNSPVADIREVYMAISHILKYRGHFLTLDKINPNNINMQNSWIDFIESCQEVFDLEISDESKNIADIFKSSENRQEKVKKILPYFQQELLKKDKSIFKQLLQLLFGLKTKFKDCFELEEEPDLNFSKENYDENLENFLGSLEEDFSDVFAKLKVLRDTILLSGMLTYTGATHARFSATMVERYEEHRKDLQRFKFFIKQNLSEQDYLDIFGRKTQNGFDVDKETKGYVGYITNKMVLTNPQKQKTIQQNFYDYISGKITGIEGAEYFLNKISDGTFLRKLRTSDNGAIPNQIHAYELEKIIERQGKDYPFLLENKDKLLSILTFKIPYYVGPLAKGSNSRFAWIKRATSSDILDDNDEDTRNGKIRPWNYQKLINMDETRDAFITNLIGNDIILLNEKVLPKRSLIYEEVMLQNELTRVKYKDKYGKAHFFDSELRQNIINGLFKNNSKRVNAKSLIKYLSDNHKDLNAIEIVSGVEKGKSFNSTLKTYNDLKTIFSEELLDSEIYQKELEEIIKVITVFDDKKSIKNYLTKFFGHLEILDEEKINQLSKLRYSGWGRYSAKLLLDIRDEDTGFNLLQFLRNDEENRNLTKLISDNTLSFEPKIKDIQSKSTIEDDIFDEIKKLAGSPAIKRGILNSIKIVDELVQIIGYPPHNIVIEMARENMTTEEGQKKAKTRKTKLESALKNIENSLLENGKVPHSDEQLQSEKLYLYYLQNGKDMYTLDKTGSPAPLYLDQLDQYEVDHIIPYSFLPIDSIDNKVLTHRENNQQKLNNIPDKETVANMKPFWEKLYNAKLISQTKYQRLTTSERTPDGVLTESMKAGFIERQLVETRQIIKHVARILDNRFSDTKIITLKSQLITNFRNTFHIAKIRELNDYHHAHDAYLAVVVGQTLLKVYPKLAPELIYGHHAHFNRHEENKATLRKHLYSNIMRFFNNPDSKVSKDIWDCNRDLPIIKDVIYNSQINFVKRTMIKKGAFYNQNPVGKFNKQLAANNRYPLKTKALCLDTSIYGGYGPMNSALSIIIIAERFNEKKGKIETVKEFHDIFIIDYEKFNNNPFQFLNDTSENGFLKKNNINRVLGFYRIPKYSLMQKIDGTRMLFESKSNLHKATQFKLTKTQNELFFHMKRLLTKSNLMDLKSKSAIKESQNFILKHKEEFDNISNQLSAFSQKMLGNTTSLKNLIKGYNERKIKEIDIRDETIKYFYDNFIKMFSFVKSGAPKDINDFFDNKCTVARMRPKPDKKLLNATLIHQSITGLYETRIDLSKLGED

SEQ ID NO: 765 - protein, 317 aa, Streptococcus sp.
FEDSILFSYQVDSKFNRKISDATIYATRKAKLDKEKSEETYVLGKIKDIYSQAGYDAFIKIYNKDKSKFLMYHKDPQTFEKVIEEILRTYPSKELNDKNKEIPCNPFEKYRQENGPIRKYSKKSNGPEIKSLKYYDNKLGNHIDITPESSDNQVVLQSLKPWRTDVYFNHQTKKYELMGLKYSDLSFEKGSGKYSISNQKYNSIKRIEGIDEQSEFKFTLYKNDLILIKDSENNEQKLFRFNSRNDTAKHYIELKPYDKAKFDGEQELITILGNVAKGGRCLKGLNKSNISIFKVKTDVLGKKHIIKKEGDEPKLKF

SEQ ID NO: 766 - protein, 1420 aa, Streptococcus sp.
MAKFNKNYSIGLDIGVSSVGYAVVTEDYRVPAFKFKVLGNTEKEKIKKNLIGSTTFVPAQSAQGTRVFRVNRRRIDRRNHRIAYLRDIFQKEIEKIDKNFYRRLDESFRVLGDKSEDIQIKQPFFGNKELETAYHKKYPTIYHLRKHLADADKNSPVADIREVYMVLSHILKYRGHFLTLGKIDPNNINMQNSWIDFIESCQDAFDLEISDESKTIAAIFKSSENRQEKVKQILSYFQQELLKKDKSIFKQLLQLLFGLKTKFKDCFELEEEPDLNFSKENYDENLENLLGALEEDFSDVFAKLKILRDTILLSSMLTYTGATHARFSATMVERYEEHRKDLQRFKSFVKQNLSEQDYLDIFGRKTPTGFDVDKETKGYVGYISNKMVLTNPQKQKTIQQNFYDYISGKITGIEGAECFLNKISDGTFLRKLRTTDNGAIPNQIHAYELEKIIERQGRDYPFLLENKDKLLSILTFKIPYYVGPLAKGNNSRFAWIKRTTSQDVLDDNDEDTRNGKIRPWNYHKLINMDETRDAFIINLIGNDIILLNEKVLPKRSLIYEEVMLQNELTRVKYKDKYGKIHFFNSELRQEIINNLFKTNSKRVSSAMLLSYLENFTNLQAVEIVSGIEKGKSLNSTLKTYNDLKTIFSEELLDSEIYQKELEEIIKVITVFDDKKSIKNYLTKYFGHLEFLNEEKINQLSKLRYTGWGRYSGKLLLGIRDEDTGFNLMQFLRNDDENRNLTQLISDTTLSFDSAIKAIQSKSTVEDDVFEEIKNLAGSPAIKRGILNSIKIVDELVQIIGYPPQNIIIEMARENMTTEEGQKKAKTRKSKLESALKNIEDSVLESGKVPHSDEQLQSEKLYLYYLQNGKDMYSLDKTGSPTPLYRDQLDQYEVDHIIPYSFLPIDSIDNKVLTHRENNQRKLNNIPDKETVANMKPFWEKLYNAKLISQTKYQRLTTSERTPDGVLTESMKAGFIERQLVETRQIIKHVARILDNRFSDTKIITLKSQLVTNFRNTFHIAKIRELNDYHHAHDAYLAVVVGQTLLKAYPKLAPELIYGHHAHFNRHEENKATLRKHLYSNIMRFFNNPDSKVSKDIWDCNRDLPIVKDVIYNSQINFVKRTMIKKGAFYNQNPVGKLNKQIAANNRYPLKTKVSSLDTSIYGGYGPMNSALSIIIIAERFNEKKGKIETVKEFHDIFIIDYEKFNNNPFQFLNNVSEEGFLKKNDLNRVLAFYRISKYSLMQKIDGTRMLFESKSNLHKVTQFKLTKTQNELFFHMKRLLTKSNLMDLKSESAIKESQNFIQTHQNEFDNIADRLSNYSQKMLGETKSLQTLINGYNERPIKQIDNNEETIRYYYDNFIKMFSFVKSGAPKDIINFFNDKYTVPRMRPKPDRKMLDATLIHQSITGLYETRIDLSKLGED

SEQ ID NO: 767 - protein, 1371 aa, Streptococcus sp.
MENKNYSIGLDIGTNSVGWSVITDDYKVPSKKMKVLGNTDKHFIKKNLIGALLFDEGTTAEARRLKRTARRRYTRRKNRLRYLQEIFSEEIGKVDSSFFHRLDDSFLIPEDKRGSKYPIFATLAEEKKYHKQFPTIYHLRKQLADSKEKTDLRLIYLALAHMIKYRGHFLYEEAFDIKNNDIQKIFNEFISIYNNTFEGNSLSGQNVQVEAIFTDKISKSAKRERVLKLFPDEKSTGLFSEFLKLIVGNQADFKKHFDLEEKAPLQFSRDTYDEDLENLLGQIGDDFADLFLVAKKLYDAILLSGILTVTNPSTKAPLSASMIERYENHQKDLASLKQFIKNNLPEKYDEVFSDQSEDGYAGYIDGKTTQETFYKYIKNLLSKFEGADYFLDKIEREDFLRKQRTFDNGSIPHQIHLQEMNAILRRQGEHYPFLKENKEKIEKILTFRIPYYVGPLARGNRDFAWLTRNSDQAIRPWNFEEIVDKASSAEDFINKMTNYDLYLPEEKVLPKHSLLYETFAVYNELTKVKFIAEGLRDYQFLDSGQKKQIVTQLFKEKRKVTEKDIIQFLHNVDGYDGIELKGIEKQFNASLSTYHDLLKIIKDKAFMDDAKNEAILENIVHTLTIFEDREMIKQRLAQYDSLFDEKVIKALTRRHYTGWGKLSAKLINGISDKQTGNTILDYLIDDGEINRNFMQLINDDGLSFKEIIQKAQVVGKTNDVKQVVQELPGSPAIKKGILQSIKIVDELVKVMGHAPESIVIEMARENQTTARGKKNSQQRYKRIEDSLKILASGLNSKILKEHPTDNIQLQNDRLFLYYLQNGKDMYTGEALDINQLSSCDIDHIIPQAFIKDDSLDNRVLTSSKDNRGKSDNVPSLEVVDKMKVFWQQLLDSKLISYRKFNNLTKAERGGLNELDKVGFIKRQLVETRQITKHVAQILDARFNKEVTEKDKKNRTVKIITLKSNLVSNFRKEFELYKVREINDYHHAHDAYLNAVVAKAILKKYPKLEPEFVYGDYQKYDLKRYISRSKDPKEIEKATEKYFFYSNLLNFFKEEVHYADGTIVKRENIEYSKDTGEIAWNKEKDFATIKKVLSLPQVNIVKKREVQTGGFSKESILPKGNSDKLIPRKTKDILWDTTKYGGFDSPVIAYSILLIADIEKGKAKKLKTVKTLVGITIMEKDAFEKNPIAFLENKGYHNVCKENILCLPKYSLFELENGRRRLLASAKELQKCNEIVLPVYLTTLLYHSKNVHKLDEPGHLEYIQKHRNEFKDLLNLVSEFSQKYVLADANLEKIKNLYADNEQADIEILANSFINLLTFTALGAPAAFKFFGKDVDRKRYTTVSEILNATLIHQSITGLYETRIDLSKLGED

SEQ ID NO: 768 - protein, 93 aa, Streptococcus sp.
MILIKDSENNEQKLFRFNSRNDTAKHYVELKPYDKARFDGQQELITILGNVAKGGQCLKGLNKSNISIFKVKTDVLGKKHIIKKEGDEPKLKF

SEQ ID NO: 769 - protein, 1121 aa, Streptococcus sp.
MNGLVLGLDIGIASVGVGILEKNSGKIIHANSRLFPAATADNNVERRKNRQARRLHRRKKHRGVRFQDLFEDYGLLTDFSKVSINLNPYRLRVDGLNQQLTNEELFIALKNIVKRRGISYLDDASEDGGTVSSDYGKAVEENRKLLAEQTPGQIQLERFEKYGQVRGDFTVVENGEKRRLINVFSTSAYRKEAERILRKQQEFNSKITDEFIEDCLKILTGKRKYYHGPGNEKSRTDYGRFRTDGTTLDNIFGILIGKCTFYPDEYRASKASYTAQEFNLLNDLNNLTVPTETKKLSEEQKKVIVEYAKEAKTLGASTLLKYIAKMIDASVDQIRGYRVDVNNKPEIHTFEAYRKMQSLETISVGELSRNVLDELAHILTLNTEREGIEEAINTKLKDSFSQDQVLELVQFRKNNSSLFSKGWHNFSLKLMMELIPELYETSEEQMTILTRLGKQKSKEISKRTKYIDEKELTEEIYNPVVAKSVRQAIKIINEATKKHGIFDNIVIEMARENNEEDAKKDYIKRQKANQDEKNAAMEKAAFQYNGKKELPDSIFHGQKELATKIRLWHQQGEKCLYTGKNIPISDLIHNQYKYEIDHILPLSLSFDDSLSNKVLVLATANQEKGQRTPFQALDSMDDAWSYREFKSYVKESKLLGNKKKEYLLTEEDISKIEVKQKFIERNLIDTRYSSRVVLNALQDFYKAHKFDTTISVVRGQFTSQLRRKWGLEKSRETYHHHAVDALIIAASSQLRLWKKQNNPLIAYKEGQFVDSETGEIISLSDDEYKELVFKAPYDHFVDTLSSKTFEDSILFSYQVDSKFNRKISDATIYATRKAKLDKEKSEETYVLGKIKDIYSQAGYDAFIKIYNKDKSKFLMYHKDPQTFEKVIEEILRTYPSKELNDKNKEIPCNPFEKYRQENGPIRKYSKKSNGPEIKSLKYYDNKLGNHIDITPESSDNQVVLQSLKPWRTDVYFNHQTKKYELMGLKYSDLSFEKGSGKYSISNQKYNSIKRIEGIDEQSEFKFTLYKNDLILIKDSENNEQKLFRFNSRNDTAKHYIELKPYDKAKFDGEQELITILGNVAKGGRCLKGLNKSNISIFKVKTDVLGKKHIIKKEGDEPKLKF

SEQ ID NO: 770 - protein, 1026 aa, Streptococcus sp.
MNGLVLGLDIGIASVGVGILEKNSGKIIHANSRLFPAATADNNVERRKNRQARRLNRRKKHRGVRFQDLFEDYGLLTDFSKVSINLNPYRLRVDGLNQQLTNEELFIALKNIVKRRGISYLDDASEDGGAVSSDYGKAVEENRKLLAEQTPGQIQLERFEKYGQVRGDFTVVENGEKRRLINVFSTSAYRKEAEKILRKQQEFNNQITDEFIEDYLKILTGKRKYYHGPGNEKSRTDYGRFRTDGTTLDNIFGVLIGKCTFYPNEYRASKSSYTAQEFNLLNDLNNLTVPTETKKLSEEQKKVIVEYAKEAKTLGASTLLKYIVKMIDASVDQISGYRVDVNNKPEMHTFEVYRKMQSLETISVGELSRNVLDELAHILTLNTEREGIEEAINSKLMGVFSQDQVLELVQFRKNNSSLFSKGWHNFSLKLMMELIPELYETSEEQMTILTRLGKQKSKETSKRTKYIDEKELTEEIYNPVVAKSVRQAIKIINEATKKHGIFDNIVIEMARENNEEDAKKDYIKRQKANQDEKNAAMEKAAFQYNGKKELPGNIFNGHKELATKIRLWHQQGEKCLYTGKTIPISDLIHNQYKYEIDHILPLSLSFDDSLSNKVLVHATANQEKGQRTPFQALDSMDDAWSYREFKSYVKDLKSLSNKKKDYLLTEEDISKIEVKQKFIERNLVDTRYSSRVVLNALQDFYKSHQFDTTISVVRGQFTSQLRRKWGLEKSRETYHHHAVDALIIAASSQLRLWKKQNNPLITYKEGQFIDSQTGEIISLTDDEYKELVFKAPYDHFVDTLHSKTFEDGILFSYQVDSKYNRKISDATIYATRKAKLDKDKSEETYVLGKIKDIYSQAGYDAFIKIYNKDKRKFLMYHKDPQTFEKVIEEILRTYPSKERNDKNKEVPCNPFEKYRQENGPIRKYSKKGNGPEIKCLKYYDNKLGNYIDISPDGSDNQVVLQSLKPWRTDVYFNHQTKKYELMGLKYSDLSFEKGSGKYSISNEKYNSIKRIEGVNEQSEFKFTLYK

SEQ ID NO: 771 - protein, 1377 aa, Streptococcus sp.
MNNKPYSIGLDIGTNSVGWSVITDDYKVPSKKMKVLGNTDKRFIKKNLIGALLFDEGTTAEARRLKRTARRRYTRRKNRLRYLQEIFAEEMSKVDSSFFHRLDDSFLIPEDKRGSKYPIFATLVEEKEYHKQFPTIYHLRKQLADSKEKADLRLIYLVLAHMIKYRGHFLYEEAFDIKNNDIQKIFNEFISIYDNTFEGSSLSGQNAQVETIFTDKISKSAKRERVLKLFPDEKSTGLFSEFLKLIVGNQADFKKHFDLEEKAPLQFSKDTYDEDLENLLEQIGDDFADLFVAAKKLYDAILLSGILTVTDPSTKAPLSASMIERYENHQKDLAVLKQFIKTNLPEKYVEVFSDQSKDGYAGYIDGKTTQEAFYKYIKNLLSKFDGADYFLDKIEREVFLRKQRTFDNGSIPHQIHLQEMNTILRRQGEHYPFLKENKEKIEKILTFRIPYHVGPLARGNRDFAWLTRNSDQAIRPWNFEEIVDKASSAEDFINKMTNYDLYLPEEKVLPKHSLLYETFAVYNELTKVKFIAEGMRDYQFLDSGQKKKIINQLFKKKRKVTEDDIIDCLQKIDNYDGIELKGIEKQFNASLSTYHDILKIIRDKEFMDDPKNGDILENVIHTLTIFEDREMIKQRLAQYNSIFDEKVIKALSRKHYTGWGKLSAKLIDGIRDKQTGKTILDYLMDDGKSNRNFMQLIKDDELSFTEIIQKAQVVGDTDNLRQVVQNLPGSPAIKKGILQSIKIVDELVKVMGHAPESIVIEMARENQTTARGKKNSQQRYKRIEDSLKNLASGLDSNILKENPTDNIQLQNDRLFLYYLQNGKDMYTGEALNINQLSSYDIDHIIPQAFIKDDSLDNRVLTSSKDNRGKSDNVPSLEVVEKMKAFWQQLLDSKLISERKYNNLTKAERERGGLNELDKVGFIKRQLVETRQITKHVAQILDARFNKEVTEKNKKNRNVKIITLKSNMVSNFRKEFGLYKVREINDYHHAHDAYLNAVVAKAILKKYPKLEPEFVYGDYQKYDLKRYISRSKDPKEVEKATEKYFFYSNLLNFFKEEVHYADGTIVKRENIEYSKDTGEIAWNKEKDFATIKKVLSLPQVNIVKKTEEQTVGQNGGLFDNNIVSKKKVVDASKLIPIKSGLSPEKYGGYARPTIAYSVLVTYKQNNKIKNTMVGIPVLTKLEFERDPNLYLRNLGINNVSHVIKLVKYTVLEFKHKYGTYRRFIVSNQELKRANQIFVTTKQMKLISQYTTLDKNEHDSLLKNNQQLIQSIWNQFLEFMLATDLVNKKQYDELILTNNQTIEECRNIMNRVITTLSFTNINAGQKKIIFDDTLSLPIKRWQFTDSDKMVKKIIESTLIHQSITGLYETRIDLSKLGED

SEQ ID NO: 772 - protein, 1371 aa, Streptococcus sp.
MNNNNYSIGLDIGTNSVGWAVITDDYKVPSKKMRVLGNTDKRFIKKNLIGALLFDEGTTAEDRRLKRTARRRYTRRKNRLRYLQEIFAEEMSKVDSSFFHRLDDSFLVPEDKSGSKYPIFATLAEEKEYHKKFPTIYHLRKHLADSKEKADLRLIYLALAHITKYRGHFLYEEAFDIKNNDIQKIFNEFINIYDNTFEGSSLSGQNAQVEAIFTGKISKSVKREHVLKLFPDEKSTGLFSEFLKLIVGNQADFKKHFDLEEKASLQFSKDTYDEDLENLLGQIGDDFADLFLVAKKLYDAILLSGILTVTDPSTKAPLSASMIERYENHQEDLAALKQFIKNNLPEKYAEVFSDQSKDGYAGYIDGKTTQEAFYKYIKNLLSKFEGADYFLDKIEREDFLRKQRTFDNGSIPHQIHLQEMNAILRRQGEHYPLLKENKEKIEKILTFRIPYYVGPLARGNRDFAWLTRNSDQAIRPWNFEEIVDKASSAESFINKMTNYDLYLPEEKVLPKHSLLYETFAVYNELTKVKFIAEGLRDYQFFDSGQKKQIVNQLFKEKRKVTEKDIIHYLHNVDGYDGIELKGIEKQFNASLSTYHDLLKIIKDKEFMDNHKNQEILENIVHTLTIFEDREMIKQRLAQYDSIFDEKVIKALTRRHYTGWGKLSAKLINGICDKKTGKTILDYLIDDGYNNRNFMQLINDDGLSFKEIIQKAQVVGKTDDLTQVVRELSGSPAIKKGILQSIKIVDELVKIMGYAPESIVIEMARENQTTAKGKKNSQQRYKRIEDALKNLAPGLDSTISKENPTDNIQLQNDRLFLYYLQNGKDMYTGEALDINQLSSYDIDHIIPQAFIKDDSLDNRVLTSSKDNRGKSDNVPSLEVVKKRKAFWQQLLDSKLISERKFNNLTKAERGGLDERDKVGFIKRQLVETRQITKHVARILDARFNTEVSEKNQKIRSVKIITLKSNLVSNFRKEFKLYKVREINDYHHAHDAYLNAVVAKAILKKYPKLEPEFVYGDYQKYDLKRYISKSKDPKEVEKATEKYFFYSNLLNFFKEEVHYADGTIVKRENIEYSKDTGEIAWNKEKDFVTIKKVLSYPQVNIVKKREVQTGGFSKESILPKGNSDKLIPRKTKDILWDTTKYGGFDSPVIAYSILLIADIEKGKAKKLKTVKTLVGITIMEKAAFEKNPITFLENKGYHNVRKENILCLPKYSLFELENGRRRLLASAKELQKGNEIVLPVYLTTLLYHSKNVHKLDEPEHLEYIQKHRYEFKDLLNLVSEFSQKYVLAEANLEKIKSLYVDNEQADIEILANSFINLLTFTALGAPAAFKFFGKDVDRKRYTTVSEILNATLIHQSITGLYETRIDLSKLGED

SEQ ID NO: 773 - protein, 1139 aa, Streptococcus sp.
MSDLVLGLDIGIGSVGVGILNKVTGEIIHKNSRIFPAAQAENNLERRTNRQGRRLTRRKKHRRVRLNHLFEESGLITDFTKVSINLNPYQLRVKGLTAELSNEELFIALKNMVKHRGISYLDDASDDGNSSVGDYAQIVKENSKQLETKTPGQIQLERYQKYGQLRGDFTVEEDGRKHRLINVFPTSAYHAEALRILQTQQEFNPQITDEFINSYLEILTGKRKYYHGPGNEKSRTDYGKYTTKKDAQGQYITLNNIFGILIGKCTFYPEEYRAAKASYTAQEFNLLNDLNNLTVPTETKKLSEEQKYQIITYVKNEKAMGPAKLFKYIAKLLSCDVADIKGYRIDKSDKAEIHTFEAYRKMKTLETLDVKKMAREELDKLAYVLTLNTEREGIQEALDHEFADGTFSQEQVDELVQFRKANSSIFGKGWHSFSVKLMMELIPELYATSEEQMTILTRLGKQKTTSSSNKTKYIDEKQLTEEIYNPVVAKSVRQAIKIVNAAIKKYGDFDNIVIEMARETNEDDEKKAIQKIQKANKAEKDAAMRKAANQYNGKAELPHSVFHGHKQLATKIRLWHQQGERCLYTGKTISIHDLINNPNQFEIDHILPLSITFDDSLANKVLVYATANQEKGQRTPYQALDSMDDAWSFRELKAFVRESKALSNKKKEYLLTEEDISKFDVRKKFIERNLVDTRYASRVVLNALQEHFRTHKIDTKVSVVRGQFTSQLRRHWGIEKTRDTYHHHAVDALIIAASSQLNLWKKQKNTLVSYSEDQLLDIETGELISDDEYKESVFKAPYQHFVDTLKSKEFEDSILFSYQVDSKFNRKISDATIYATRKAKLDKEKKEYTYTLGKIKDIYALGTKTPSKTGFYKFLDLYKKDKSQFLMYQKDRRTWDEVIEKILEQYRPFKEKDKNGKEVDFNPFEKYRIENGPIRKYSRKGNGPEIKSLKYYDNLLGRFVDITPSESKNPVALLSLNPWRTDVYYNTETRKYEFLGLKYADLCFEKGGSYGISKVKYNKIREKEGIGKNSEFKFTLYKNDLILIKDTETNRQQIFRFWSRTGKDNPKSFEKHKLELKPYEKTRFEKGEELKVLGKVPPSSNRLQKNMQIENLSIYKVRTDVLGNQHIIKNEGDKPKLDF

SEQ ID NO: 774 - protein, 1375 aa, Streptococcus sp.
MSNKSYSIGLDIGTNSVGWAVITDDYKVPSKKMKVLGNTDKHFIKKNLIGALLFDEGTTAEDRRLKRTARRRYTRRKNRLRYLQEIFSQEISKVDSSFFHRLDDFFLVPEDKRGSKYPIFATLVEEKEYHKKFPTIYHLRKHLADSKEKTDLRLIYLALAHMIKYRGHFLYEESFDIKNNDIQKIFSEFISIYDNTFEGKSLSGQNAQVEAIFTDKISKSTKRERVLKLFPDEKSTGLFSEFLKLIVGNQADFKKHFDLEEKAPLQFSKDTYDEDLENLLGQIGDDFADLFLVAKKLYDAILLSGILTVKDLSTKAPLSASMIERYENHQKDLAALKQFIQNNLQEKYDEVFSDQSKDGYAGYIDGKTTQEAFYKYIKNLLSKFEGADYFLDKIEREDFLKKQRTFDNGSIPHQIHLQEMNAIIRRQGEHYPFLQENKEKIEKILTFRIPYYVGPLARGNGDFAWLTRNSDQAIRPWNFEEIVDQASSAEDFINKMTNYDLYLPEEKVLPKHSLLYETFAVYNELTKVKFIAEGLTRYQFLDKKQKKDIFDTFFKAENKRKVTEKDIIHYLHNVDGYDGIELKGIEKQFNASLSTYHDLLKIIKDKAFMDDSKNEEILENIIHTLTIFEDREMIKQRLAQYDSLFDEKVIKALTRRHYTGWGKLSAKLINGIRDKKSGKTILDYLIDDGEINRNFMQLIHDDGLSFKEIIQKAQVFGKTNDVKQVVQELPGSPAIKKGILQSIKIVDELVKVMGHAPESIVIEMARENQTTARGKKNSQQRYKRIEDSLKNLASGLDSNILKENPTDNIQLQNDRLFLYYLQNGRDMYTGKPLEINQLSNYDIDHIIPQAFIKDDSLDNRVLTSSKDNRGKSDNVPSLEVVEKMKAFWQQLLDSKLISERKFNNLTKAERERGGLNELDKVGFIKRQLVETRQITKHVAQFLDARFNKEVTEKDKKNRNVKIITLKSNLVSNFRKEFGLYKVREINDYHHAHDAYLNAVLAKAILKKYPKLEPEFVYGDYQKYDLQRYISKSREPKEVEKATQKYFFYSNLLNFFKEEVHYADGTIVKRENIEYSKDTGEIAWNKEKDFATVKKVLSLPQVNIVKKTEVQTGGFSKESILPKGNSDKLIPRKTKEILWDTTKYGGFDSPVIAYSILLIADIEKGKAKKLKTVKTLVGITIMEKATFEKNPITFLENKGYHNVRKENILCLPKYSLFELESGRRRMLASAKELQKGNEIVLPVYLTTLLYHSKNVHKLDEPEHLEYIQKHRYEFKDLLNLVSEFSQKYVLADANLEKIKNLYADNEQADIEILANSFINLLTFTALGAPAAFKFLGKDVDRKRYTTVSEILNATLIHQSITGLYETRIDLSKLGED

SEQ ID NO: 775 - protein, 206 aa, Streptococcus sp.
RTPFQALDSMDDAWSYREFKSYVKESKLLGNKKKEYLLTEEDISKIEVKQKFIERNLIDTRYSSRVVLNALQDFYKAHKFDTTISVVRGQFTSQLRRKWGLEKSRETYHHHAVDALIIAASSQLRLWKKQNNPLIAYKEGQFVDSETGEIISLSDDEYKELVFKAPYDHFVDTLSSKTFEDSILFSYQVDSKFNRKISDATIYATR

SEQ ID NO: 776 - protein, 1122 aa, Streptococcus suis
MSNGKILGLDIGIASVGVGVIDAQTGEIIHASSRIFPSANAANNAERRTFRGSRRLIRRKKHRIKRLDDLFNDFHINLDGEMSTDNPYVLRVKGLSQKLTVEELYISIKNIMKRRGISYLDDAESDNEAGRSDYAKAIERNRQLLTSKTPGEIQLERLEKYGQLRGNFTIIDEEGQSQQIINVFSTSDYVKEVEKILDCQKMYHKFISDEFCDKLIELLREKRKYYVGPGNEKSRTDYGIYRTDGTTLENLFGILIGKCTFYPDQYRSSRASYTAQEFNFLNDLNNLTVPTETKKLSQEQKEFLVNYAKETSVLGAGKILQQIAKLADCKVEDIRGYRLDNKDKPELHTFETYRAMKGLVPLVDIGVLSREQLDILADILTLNTDFEGIREALKKQLPNVFDEKQVKGLASFRKSKSQLFAKGWHNLSQKIMLEVIPELYATSDEQMTILTRLGKFEKSSVAEYPSSINVDEITDEIYNPVVAKSIRQTIKIINASIKKWDEFDQIVIEMPRDRNEDEEKKRIADGQKANAKEKADSILRAAELYCAGKVLPDYVYNGHNQLATKIRLWYQQGERCIYTGQPISIHDLIHNQNQYEIDHILPLSLTFDDSLSNKVLVLATANQEKAQRTPYNYLKSATSAWSYREFKDYVTKRKGIGKKKCEYLTFEEDINGFEVRSKFIQRNLVDTRYASKVILNALQDYFKISGIQTKVSVVRGQFTSQLRHKWGIEKTRETYHHHAVDALIIAASSQLRLWKKQESPLVVDYQEGRQVDLETGEILELTDEQYKELVYQPPYQGFVNTISSSAFDNEILFSYQVDSKVNRKISDATIYATRNAQLGKDKTEGIYVLGKIKDIYTQAGYEAFLKRYTKDKTSFLMYHKDLDTWEKVIEIILRDYREYDEKGKEIGNPFERYRRENGYVKKYSRKGNGTAIKSLKYYDNKLGNHIDITPENSRNAVVLQSLKPWRTDVYFNKETGKYEFLGIKYSDLSFEKGTGEYGISQEKYDSIKIAEGVAKKSIFKFTLYKQDLLFIKDIENNFGKLLRFTSKNDTSKHYVELKPYDKNKFGTEEPLLPVLGNVAKSGQCIKGLNKSNISIYKVRTDILGYRHFIKQEGEHPQLKFKK

SEQ ID NO: 777 - protein, 1381 aa, Streptococcus suis
MVKKKYAIGIDIGTNSVGWSIVTDDYKVPSKKMKVFGNTEKRYIKKNLLGTLLFDEGNTAENRRLKRTARRRYTRRRNRILYLQEIFAEEINKIDDSFFQRLDDSFLIVEDKQGSKHPIFGTLQEEKEYHKQFPTIYHLRKQLADSSQKADIRLIYLALAHIIKYRGHFLFEGDLKSENKDVQHLFNDFVEMFDKTVEGSYLSENLPNVADVLVEKVSKSRRLENILHYFPNEKKNGLFGNFLALALGLQPNFKTNFELAEDAKIQFSKETYEEDLEELLGKIGDDYADLFIATKSLYDGILLAGILSTTDSTTKAPLSSSMVNRYEEHQKDLALLKNFIHQNLSDSYKEVFNDKLKDGYAGYIEGKTTQENFYRFIKKAIEKIEGSNYFIDKIDREDFLRKQRTFDNGSIPHQIHLQEMHAIIRRQAEFYPFLVENQDKIEKILTFRIPYYVGPLARGKSEFAWLNRKSDEKIRPWNFDEMVDKETSAENFITRMTNYDRYLPDQKVLPKHSLLYEKFAVYNELTKVKFIAEGMRDYQFLDSGQKKDIVKTLFKTKRKVTAKDIKAYLENSNGYAGVELKGLEEQFNASLPTYHDLLKILRDKAFIDAEENQEILEDIVLTLTLFEDREMIRKRLEKYKDILTEEQRKKLERRHYTGWGRLSAKLINGILDKVTRKTILGYLIDDGTSNRNFMQLINDDTLSFVDEIRLAQGSGEAEDYRAEVQNLAGSPAIKKGILQSLKIVDELIEVMGYEPEHIVVEMARENQFTNQGRRNSQQRINRLENALKDFGSKILEEQKPYGVSKVNNIHLQSDRLFLYYLQNGKDMYTDEELDIDHLSEYDIDHIIPQAFIKDDSLDNKVLTKSAKNRGKSDDVPSMEIVHNRKNFWRQLLKSKLISQRKFDNLTKAERGGLTNEDKARFIQRQLVETRQITKHVARMLDTRFNTKLDEAGNRIRDPKVNIITLKSNLVSQFRKDYQLYKIREINNYHHAHDAYINAVVATALLKKYPQLAPEFVYGEYPTYNSYNSRKSATEKVLFYSNIMNFFKRIVVHSKTGEVRIRPVIEVNKETGEIVWDKKSDFRTVRKVLSYPQVNVVKKTEVQNHGLDRGKPKGFYNANLSPRPKEGSVENLVPAKQSFDTKRYGGYAGISNSYAVLVNGIIEKGKKKSKAEVTEFQGISILARKDFDKNPKQYLLNLGYKDIKSIIKLPKYSLFELENGSRRMLASILSTNNKRGEIHKGNEMYLPDKFVTLLYHAMRVNRTLEPGHKKYVETHRHVFDELLIYILEYNEKIVGAKANGKRIVEAYSARKDTDNLEELCNSFINLLNLTALGSAVDFEFLGTKIPRYRDYTPSSLLKATLIHQSVTGLYETRIDLSKLGGD

SEQ ID NO: 778 - protein, 39 aa, Streptococcus thermophilus
GRCIKGLGKSNISIYKVRTDVLGNQHIIKNEGDKPKLDF

SEQ ID NO: 779 - protein, 302 aa, Streptococcus thermophilus
MIRRKKHRIVRLNRLFEESGLITDFTKISINLNPYQLRVKGLTDELSNEELFIALKNMVKHRGISYLDDASDDGNSSVGDYAQIVKENSKQLETKTPGQIQLERYQTYGQLRGDFTVEKDGKKHRLINVFPTSAYRSEALRILQTQQEFNPQITDEFINRYLEILTGKRKYYHGPGNEKSRTDYGRYRTSGETLDNIFGILIGKCTFYPDEFRAAKASYTAQEFNLLNDLNNLTVPTETKKLSKEQKNQIINYVKNEKAMGPAKLFKYIAKLLSCDVADIKGYRIDKSGKAERFILSKPIEK

SEQ ID NO: 780 - protein, 1121 aa, Streptococcus thermophilus
MSDLVLGLDIGIGSVGVGILNKVTGEIIHKNSRIFPAAQAENNLVRRTNRQGRRLTRRKKHRIVRLNRLFEESGLITDFTKISINLNPYQLRVKGLTDELSNEELFIALKNMVKHRGISYLDDASDDGNSSVGDYAQIVKENSKQLETKTPGQIQLERYQTYGQLRGDFTVEKDGKKHRLINVFPTSAYRSEALRILQTQQEFNPQITDEFINRYLEILTGKRKYYHGPGNEKSRTDYGRYRTSGETLDNIFGILIGKCTFYPDEFRAAKASYTAQEFNLLNDLNNLTVPTETKKLSKEQKNQIINYVKNEKAMGPAKLFKYIAKLLSCDVADIKGYRIDKSGKAEIHTFEAYRKMKTLETLDIEQMDRETLDKLAYVLTLNTEREGIQEALEHEFADGSFSQKQVDELVQFRKANSSIFGKGWHNFSVKLMMELIPELYETSEEQMTILTRLGKQKTTSSSNKTKYIDEKLLTEEIYNPVVAKSVRQAIKIVNAAIKEYGDFDNIVIEMARETNEDDEKKAIQKIQKANKDEKDAAMLKAANQYNGKAELPHSVFHGHKQLATKIRLWHQQGERCLYTGKTISIHDLINNSNQFEVDHILPLSITFDDSLANKVLVYATANQEKGQRTPYQALDSMDDAWSFRELKAFVRESKTLSNKKKEYLLTEEDISKFDVRKKFIERNLVDTRYASRVVLNALQEHFRAHKIDTKVSVVRGQFTSQLRRHWGIEKTRDTYHHHAVDALIIAASSQLNLWKKQKNTLVSYSEDQLLDIETGELISDDEYKESVFKAPYQHFVDTLKSKEFEDSILFSYQVDSKFNRKISDATIYATRQAKVGKDKADETYVLGKIKDIYTQDGYDAFMKIYKKDKSKFLMYRHDPQTFEKVIEPILENYPNKQMNEKGKEVPCNPFLKYKEEHGYIRKYSKKGNGPEIKSLKYYDSKLGNHIDITPKDSNNKVVLQSVSPWRADIYFNNTTGKYEILGLKYADLQFEKGTGTYKISQEKYNDIKKKEGVDSDSEFKFTLYKNDLLLVKETETKEQQLFRFLSRTMPKQKHYVELKPYDKQKFEGGEALIKVLGNVANGGQCIKGLGKSNISIYKVRTDVLGNQHIIKNEGDKPKLDF

SEQ ID NO: 781 - protein, 1121 aa, Streptococcus thermophilus
MSDLVLGLDIGIGSVGVGILNKVTGEIIHKNSRIFPAAQAENNLVRRTNRQGRRLTRRKKHRIVRLNRLFEESGLITDFTKISINLNPYQLRVKGLTDELSNEELFIALKNMVKHRGISYLDDASDDGNSSVGDYAQIVKENSKQLETKTPGQIQLERYQTYGQLRGDFTVEKDGKKHRLINVFPTSAYRSEALRILQTQQEFNPQITDEFINRYLEILTGKRKYYHGPGNEKSRTDYGRYRTSGETLDNIFGILIGKCTFYPDEFRAAKASYTAQEFNLLNDLNNLTVPTETKKLSKEQKNQIINYVKNEKAMGPAKLFKYIAKLLSCDVADIKEYRIDKSGKAEIHTFEAYRKMKTLETLDIEQMDRETLDKLAYVLTLNTEREGIQEALEHEFADGSFSQKQVDELVQFRKANSSIFGKGWHNFSVKLMMELIPELYETSEEQMTILTRLGKQKTTSSSNKTKYIDEKLLTEEIYNPVVAKSVRQAIKIVNAAIKEYGDFDNIVIEMARETNEDDEKKAIQKIQKANKDEKDAAMLKAANQYNGKAELPHSVFHGHKQLATKIRLWHQQGERCLYTGKTISIHDLINNSNQFEVDHILPLSITFDDSLANKVLVYATANQEKGQRTPYQALDSMDDAWSFRELKAFVRESKTLSNKKKEYLLTEEDISKFDVRKKFIERNLVDTRYASRVVLNALQEHFRAHKIDTKVSVVRGQFTSQLRRHWGIEKTRDTYHHHAVDALIIAASIQLNLWKKQKNTLVSYSEDQLLDIETGELISDDEYKESVFKAPYQHFVDTLKSKEFEDSILFSYQVDSKFNRKISDATIYATRQAKVGKDKADETYVLGKIKDIYTQDGYDAFMKIYKKDKSKFLMYRHDPQTFEKVIEPILENYPNKQINEKGKEVPVNPFLKYKEEHGYIRKYSKKGNGPEIKSLKYYDSKLGNHIDITPKDSNNKVVLQSVSPWRADVYFNKTTGKYEILGLKYADLQFEKGTGTYKISQEKYNDIKKKEGVDSDSEFKFTLYKNDLLLVKDTETKEQQLFRFLSRTMPKQKHYVELKPYDKQKFEGGEALIKVLGNVANSGQCKKGLGKSNISIYKVRTDVLGNQHIIKNEGDKPKLDF

SEQ ID NO: 782 - protein, 1121 aa, Streptococcus thermophilus
MSDLVLGLDIGIGSVGVGILNKVTGEIIHKNSRIFPAAQAENNLVRRTNRQGRRLTRRKKHRRVRLNRLFEESGLITDFTKISINLNPYQLRVKGLTDELSNEELFIALKNMVKHRGISYLDDASDDGNSSVGDYAQIVKENSKQLETKTPGQIQLERYQTYGQLRGDFTVEKDGKKHRLINVFPTSAYRSEALRILQTQQEFNPQITDEFVNRYLEILTGKRKYYHGPGNEKSRTDYGRYRTNGETLDNIFGILIGKCTFYPEEFRAAKASYTAQEFNLLNDLNNLTVPTETKKLSKEQKNQIINYVKNEKAMGPAKLFKYIAKLLSCDVADIKGYRIDKSGKAEIHTFEAYRKMKTLETLDIEQMDRETLDKLAYVLTLNTEREGIQEALEHEFADGSFSQKQVDELVQFRKANSSIFGKGWHNFSVKLMMELIPELYETSEEQMTILKRLGKQKTTSSSNKTKYIDEKLLTEEIYNPVVAKSIRQAIKIVNAAIKEYGDFDNIVIEMARETNEDDEKKAIQKIQKANKDEKDAAMLKAANQYNGKAELPHSVFHGHKQLATKIRLWHQQGERCLYTGKTISIHDLINNPNQFEVDHILPLSITFDDSLANKVLVYATANQEKGQRTPYQALDSMDDAWSFRELKAFVRESKTLSNKKKEYLLTEEDISKFDVRKKFIERNLVDTRYASRVVLNALQEHFRAHKIDTKVSVVRGQFTSQLRRHWGIEKTRDTYHHHAVDALIIAASSQLNLWKKQKNTLVSYSEDQLLDIETGELISDDEYKESVFKAPYQHFVDTLKSKEFEDSILFSYQVDSKFNRKISDATIYATRQAKVGKDKKDETYVLGKIKDIYTQDGYDAFMKIYKKDKSKFLMYRHDPQTFEKVIEPILENYPNKEMNEKGKEVPCNPFLKYKEEHGYIRKYSKKGNDPEIKSLKYYDSKLGNHIDITPKDSNNKVVLQSVSPWRADVYFNKTTGKYEILGLKYADLQFEKGTGTYKISQEKYNDIKKKEGVDSDSEFKFTLYKNDLLLVKDTETKEQQLFRFLSRTMPKQKHYVELKPYDKQKFEGGEALIKVLGNVANSGQCKKGLGKSNISIYKVRTDVLGNQHIIKNEGDKPKLDF

SEQ ID NO: 783 - protein, 1122 aa, Streptococcus thermophilus
MSDLVLGLDIGIGSVGVGILNKVTGEIIHKNSRIFPAAQAENNVERRTNRQGRRLTRRKKHRRVRLNRLFEESGLITDFTKISINLNPYQLRVRGLTDELSNEELFIALKNMVKHRGISYLDDASDDGNSSVGDYAQIVKENSKQLETKTPGQIQLERYQTYGQLRGDFTVEKDGKKHRLINVFPTSAYRSEALRILQTQQEFNSQITDEFINRYLEILTGKRKYYHGPGNEKSRTDYGRYRTSGETLDNIFGILIGKCTFYPEEFRAAKASYTAQEFNLLNDLNNLTVPTETKKLSKEQKNQIINYVKNEKAMGPAKLFKYIAKLLSCDVADIKGYRIDKSGKAEIHTFEAYRKMKTLETLDIEQMDRETLDKLAYVLTLNTEREGIQEALEHEFADGSFSQKQVDELVQFRKASSSIFGKGWHNFSVKLMMELIPELYETSEEQMTILTRLGKQKTTSSSNKTKYIDEKLLTEEIYNPVVAKSVRQAIKIVNAAIKEYGDFDNIVIEMARETNEDDEKKAIQKIQKANKDEKDAAMLKAANQYNGKAELPHSVFHGHKQLATKIRLWHQQGERCLYTGKTISIHDLINNPNQFEVDHILPLSITFDDSLANKVLVYATANQEKGQRTPYQALDSMDDAWSFRELKAFVRESKTLSNKKKEYLLTEEDISKFDVRKKFIERNLVDTRYASRVVLNALQEHFRAHKIDTKVSVVRGQFTSQLRRHWGIEKTRDTYHHHAVDALIIAASSQLNLWKKQKNTLVSYSEDQLLDIETGELISDDEYKESVFKAPYQHFVDTLKSKEFEDSILFSYQVDSKFNRKLSDATIYATRQAKVGKDKKDETYVLGKIKDIYTQDGYDAFMKIYKKDKSKFLMYRHDPQTFEKVIEPILENYPNKEMNEKGKEVPCNPFLKYKEEHGYIRKYSKKGNGPEIKSLKYYDSKLLGNPIDITPENSKNKVVLQSLKPWRADVYFNKTTGKYEILGLKYADLQFEKKTGTYKISQEKYNGIMKEEGVDSDSEFKFTLYKNDLLLVKDTETKEQQLFRFLSRTMPNVKYYVELKPYSKDKFEKNESLIEILGSADKSGRCIKGLGKSNISIYKVRTDVLGNQHIIKNEGDKPKLDF

SEQ ID NO: 784 - protein, 1388 aa, Streptococcus thermophilus
MTKPYSIGLDIGTNSVGWAVITDNYKVPSKKMKVLGNTSKKYIKKNLLGVLLFDSGITAEGRRLKRTARRRYTRRRNRILYLQEIFSTEMATLDDAFFQRLDDSFLVPDDKRDSKYPIFGNLVEEKAYHDEFPTIYHLRKYLADSTKKADLRLVYLALAHMIKYRGHFLIEGEFNSKNNDIQKNFQDFLDTYNAIFESDLSLENSKQLEEIVKDKISKLEKKDRILKLFPGEKNSGIFSEFLKLIVGNQADFRKCFNLDEKASLHFSKESYDEDLETLLGYIGDDYSDVFLKAKKLYDAILLSGFLTVTDNETEAPLSSAMIKRYNEHKEDLALLKEYIRNISLKTYNEVFKDDTKNGYAGYIDGKTNQEDFYVYLKNLLAEFEGADYFLEKIDREDFLRKQRTFDNGSIPYQIHLQEMRAILDKQAKFYPFLAKNKERIEKILTFRIPYYVGPLARGNSDFAWSIRKRNEKITPWNFEDVIDKESSAEAFINRMTSFDLYLPEEKVLPKHSLLYETFNVYNELTKVRFIAESMRDYQFLDSKQKKDIVRLYFKDKRKVTDKDIIEYLHAIYGYDGIELKGIEKQFNSSLSTYHDLLNIINDKEFLDDSSNEAIIEEIIHTLTIFEDREMIKQRLSKFENIFDKSVLKKLSRRHYTGWGKLSAKLINGIRDEKSGNTILDYLIDDGISNRNFMQLIHDDALSFKKKIQKAQIIGDEDKGNIKEVVKSLPGSPAIKKGILQSIKIVDELVKVMGGRKPESIVVEMARENQYTNQGKSNSQQRLKRLEKSLKELGSKILKENIPAKLSKIDNNALQNDRLYLYYLQNGKDMYTGDDLDIDRLSNYDIDHIIPQAFLKDNSIDNKVLVSSASNRGKSDDFPSLEVVKKRKTFWYQLLKSKLISQRKFDNLTKAERGGLLPEDKAGFIQRQLVETRQITKHVARLLDEKFNNKKDENNRAVRTVKIITLKSTLVSQFRKDFELYKVCEINDFHHAHDAYLNAVIASALLKKYPKLEPEFVYGDYPKYNSFRERKSATEKVYFYSNIMNIFKKSISLADGRVIERPLIEVNEETGESVWNKESDLATVRRVLSYPQVNVVKKVEEQNHGLDRGKPKGLFNANLSSKPKPNSNENLVGAKEYLDPKKYGGYAGISNSFAVLVKGTIEKGAKKKITNVLEFQGISILDRINYRKDKLNFLLEKGYKDIELIIELPKYSLFELSDGSRRMLASILSTNNKRGEIHKGNQIFLSQKFVKLLYHAKRISNTINENHRKYVENHKKEFEELFYYILEFNENYVGAKKNGKLLNSAFQSWQNHSIDELCSSFIGPTGSERKGLFELTSRGSAADFEFLGVKIPRYRDYTPSSLLKDATLIHQSVTGLYETRIDLAKLGEG

SEQ ID NO: 785 - protein, 1388 aa, Streptococcus thermophilus
MTKPYSIGLDIGTNSVGWAVITDNYKVPSKKMKVLGNTSKKYIKKNLLGVLLFDSGITAEGRRLKRTARRRYTRRRNRILYLQEIFSTEMATLDDAFFQRLDDSFLVPDDKRDSKYPIFGNLVEEKAYHDEFPTIYHLRKYLADSTKKADLRLVYLALAHMIKYRGHFLIEGEFNSKNNDIQKNFQDFLDTYNAIFESDLSLENSKQLEEIVKDKISKLEKKDRILKLFPGEKNSGIFSEFLKLIVGNQADFRKCFNLDEKASLHFSKESYDEDLETLLGYIGDDYSDVFLKAKKLYDAILLSGFLTVTDNETEAPLSSAMIKRYNEHKEDLALLKEYIRNISLKTYNEVFKDDTKNGYAGYIDGKTNQEDFYVYLKNLLAEFEGADYFLEKIDREDFLRKQRTFDNGSIPYQIHLQEMRAILDKQAKFYPFLAKNKERIEKILTFRIPYYVGPLARGNSDFAWSIRKRNEKITPWNFEDVIDKESSAEAFINRMTSFDLYLPEEKVLPKHSLLYETFNVYNELTKVRFIAESMRDYQFLDSKQKKDIVRLYFKDKRKVTDKDIIEYLHAIYGYDGIELKGIEKQFNSSLSTYHDLLNIINDKEFLDDSSNEAIIEEIIHTLTIFEDREMIKQRLSKFENIFDKSVLKKLSRRHYTGWGKLSAKLINGIRDEKSGNTILDYLIDDGISNRNFMQLIHDDALSFKKKIQKAQIIGDEDKGNIKEVVKSLPGSPAIKKGILQSIKIVDELVKVMGGRKPESIVVEMARENQYTNQGKSNSQQRLKRLEKSLKELGSKILKENIPAKLSKIDNNALQNDRLYLYYLQNGKDMYTGDDLDIDRLSNYDIDHIIPQAFLKDNSIDNKVLVSSASNRGKSDDFPSLEVVKKRKTFWYQLLKSKLISQRKFDNLTKAERGGLLPEDKAGFIQRQLVETRQITKHVARLLDEKFNNKKDENNRAVRTVKIITLKSTLVSQFRKDFELYKVREINDFHHAHDAYLNAVIASALLKKYPKLEPEFVYGDYPKYNSFRERKSATEKVYFYSNIMNIFKKSISLADGRVIERPLIEVNEETGESVWNKESDLATVRRVLSYPQVNVVKKVEEQNHGLDRGKPKGLFNANLSSKPKPNSNENLVGAKEYLDPKKYGGYAGISNSFAVLVKGTIEKGAKKKITNVLEFQGISILDRINYRKDKLNFLLEKGYKDIELIIELPKYSLFELSDGSRRMLASILSTNNKRGEIHKGNQIFLSQKFVKLLYHAKRISNTINENHRKYVENHKKEFEELFYYILEFNENYVGAKKNGKLLNSAFQSWQNHSIDELCSSFIGPTGSERKGLFELTSRGSAADFEFLGVKIPRYRDYTPSSLLKDATLIHQSVTGLYETRIDLAKLGEG

SEQ ID NO: 786 - protein, 595 aa, Streptococcus thermophilus
MVQFRKANSSIFGKGWHNFSVKLMMELIPELYETSEEQMTILKRLGKQKTTSSSNKTKYIDEKLLTEEIYNPVVAKSVRQAIKIVNAAIKEYGDFDNIVIEMARETNEDDEKKAIQKIQKANKDEKDAAMLKAANQYNGKAELPHSVFHGHKQLATKIRLWHQQGERCLYTGKTISIHDLINNPNQFEVDHILPLSITFDDSLANKVLVYATANQEKGQRTPYQALDSMDDAWSFRELKAFVRESKTLSNKKKEYLLTEEDISKFDVRKKFIERNLVDTRYASRVVLNALQEHFRAHKIDTKVSVVRGQFTSQLRRHWGIEKTRDTYHHHAVDALIIAASSQLNLWKKQKNTLVSYSEDQFLDIETGELISDDEYKESVFKAPYQHFVDTLKSKEFEDSILFSYQVDSKFNRKISDATIYATRKAKLDKEKKEYTYTLGKIKDIYTQAGYDAFIKIYKKDKSKFLMYHHDPQTFEKVIEPILENYPNKEINEKGKEVPCNPFLKYKEEHGYIRKYSKKGNGPEIKSFKYYDNLLGRHIDITPKNSKNIVALRKLNPWRTDVYFNHETMKYEFLGLKYADISYKKSKNKAGDFLPK

SEQ ID NO: 787 - protein, 1388 aa, Streptococcus thermophilus
MTKPYSIGLDIGTNSVGWAVITDNYKVPSKKMKVLGNTSKKYIKKNLLGVLLFDSGITAEGRRLKRTARRRYTRRRNRILYLQEIFSTEMATLDDAFFQRLDDSFLVPDDKRDSKYPIFGNLVEEKVYHDEFPTIYHLRKYLADSTKKADLRLVYLALAHMIKYRGHFLIEGEFNSKNNDIQKNFQDFLDTYNAIFESDLSLENSKQLEEIVKDKISKLEKKDRILKLFPGEKNSGIFSEFLKLIVGNQADFRKCFNLDEKASLHFSKESYDEDLETLLGYIGDDYSDVFLKAKKLYDAILLSGFLTVTDNETEAPLSSAMIKRYNEHKEDLALLKEYIRNISLKTYNEVFKDDTKNGYAGYIDGKTNQEDFYVYLKNLLAEFEGADYFLEKIDREDFLRKQRTFDNGSIPYQIHLQEMRAILDKQAKFYPFLAKNKERIEKILTFRIPYYVGPLARGNSDFAWSIRKRNEKITPWNFEDVIDKESSAEAFINRMTSFDLYLPEEKVLPKHSLLYETFNVYNELTKVRFIAESMRDYQFLDSKQKKDIVRLYFKDKRKVTDKDIIEYLHAIYGYDGIELKGIEKQFNSSLSTYHDLLNIINDKEFLDDSSNEAIIEEIIHTLTIFEDREMIKQRLSKFENIFDKSVLKKLSRRHYTGWGKLSAKLINGIRDEKSGNTILDYLIDDGISNRNFMQLIHDDALSFKKKIQKAQIIGDEDKGNIKEVVKSLPGSPAIKKGILQSIKIVDELVKVMGGRKPESIVVEMARENQYTNQGKSNSQQRLKRLEKSLKELGSKILKENIPAKLSKIDNNALQNDRLYLYYLQNGKDMYTGDDLDIDRLSNYDIDHIIPQAFLKDNSIDNKVLVSSASNRGKSDDFPSLEVVKKRKTFWYQLLKSKLISQRKFDNLTKAERGGLLPEDKAGFIQRQLVETRQITKHVARLLDEKFNNKKDENNRAVRTVKIITLKSTLVSQFRKDFELYKVREINDFHHAHDAYLNAVIASALLKKYPKLEPEFVYGDYPKYNSFRERKSATEKVYFYSNIMNIFKKSISLADGRVIERPLIEVNEETGESVWNKESDLATVRRVLSYPQVNVVKKVEEQNHGLDRGKPKGLFNANLSSKPKPNSNENLVGAKEYLDPKKYGGYAGISNSFAVLVKGTIEKGAKKKITNVLEFQGISILDRINYRKDKLNFLLEKGYKDIELIIELPKYSLFELSDGSRRMLASILSTNNKRGEIHKGNQIFLSQKFVKLLYHAKRISNTINENHRKYVENHKKEFEELFYYILEFNENYVGAKKNGKLLNSAFQSWQNHSIDELCSSFIGPTGSERKGLFELTSRGSAADFEFLGVKIPRYRDYTPSSLLKDATLIHQSVTGLYETRIDLAKLGEG

SEQ ID NO: 788 - protein, 1038 aa, Streptococcus vestibularis
MIDELSNEELFIALKNMVKHRGISYLDDASDDGNSSVGDYAQIVKENSKQLETKTPGQIQLERYQKYGQLRGDFTVEEDGKKHRLINVFPTSAYRAEALRILQTQQEFNSQITDEFINRYLEILTGKRKYYHGPGNEKSRTDYGRYRTSGETLDNIFGILIGKCTFYPEEFRAAKASYTAQEFNLLNDLNNLTVPTETKKLSEEQKNQIINYVKNEKAMGPAKLFKYIAKLLSCDIADIKGYRIDKSDKAEIHTFEAYRKMKTLETIDIEKMSREELDKLAYVLTLNTEREGIQEALEHEFVDGNFSQEQIDELVQFRKANSSIFGKGWHNFSVKLMMELIPELYATSEEQMTILTRLGKQKTTSSSNKTKYIDEKLLTEEIYNPVVAKSVRQAIKIVNAAIKEYGDFDNIVIEMARATNEDDEKKAIQKIQKANKDEKDAAMLKAANQYNGKAELPHSVFHGHKQLATKIRLWHQQGERCLYTGKTISIHDLINNPNQFEIDHILPLSITFDDSLANKVLVYATANQEKGQRTPYQALDSMDDAWSFRELKAFVRESKTLSNKKKEYLLTEEDISKFDVRKKFIERNLVDTRYASRVVLNALQEHFRAHKIDTKVSVVRGQFTSQLRRHWGIEKTRDTYHHHAVDALIIAASSQLNLWKKQKNTLVNYSENQLLDIETGELISDDEYKESVFKAPYQHFVDTLKSKEFEDSILFSYQVDSKFNRKISDATIYATRKAKLDKEKKEYTYTLGKIKDIYALGTKTPSKTGFYKFLDLYKKNKSQFLMYQKDRKTWDEVIEKILEQYRPFKEKDKNGKEVDFNPFEKYRIENGPIRKYSRKGNGPEIKSLKYYDNLLGRFVDITPSESKNPVALLSLNPWRTDVYYNTETRKYEFLGLKYADLCFEKGGSYGISKVKYNKIREKEGIGKNSEFKFTLYKNDLILIKDTETNRQQVFRFWSRTGKDNPKRFEKHKIELKPYEKARFEKGEELEVLGKVPPSSNQLQKNMQIENLSIFKVRTDVLGNQHIIKNEGDKPKLDF

SEQ ID NO: 789 - protein, 97 aa, Streptococcus vestibularis
MSDLVLGLDIGIGSVGVGILNKVTGEIIHKNSRIFPAAQAENNVERRTNRQGRRLTRRKKHRRVRLNHLFEESGLITDFTKVSINLNPYQLRVKIDR

SEQ ID NO: 790 - protein, 1084 aa, Subdoligranulum sp.
MKNTLYGIGLDIGVASVGWAVVGLNGTGEPVGLHRLGVRIFDKAEQPKTGESLAAPRRMARGMRRRLRRKALRRADVYALLERSGLSTREELAQMFEAGGLEDIYALRTRALDEPVGKAEFSRILLHLAQRRGFKSNRRTASDGEDGRLLAAVNENRRRMAQGGWRTVGEMLYRHEAFALHKRNKADDYLSTVGRDMVAEEASILFERQRAMGCSWAAPELQAEYLSILLRQRSFDEGPGGNSPYGGNQVEKMVGRCTFEPDEPRAAKAAYSFEYFSLLQKLNHIRLAENGETRPLTQPQRQQLLSLAHKTPDISLARIRKELALPETVQFNGVRCRANETLEESEKKEKFACLPAYHKMRKALDGVVKGRISSLSISQRDAAATALSLYKNEDTLRAKLTEAGFQAPEIDALAGLTGFSKFGHLSLKACRKLIPHLEQGLTYDQACTAAGYDFKGHGAGERAFTLPAAAPEMEQITSPVVRRAVAQTIKVVNGIIREMDASPAWVRIELARELSKTFGERQEMDRSMRENAAQNERLMQELRDTFHLLSPTGQDLVKYRLWKEQDGVCAYSLRRLDVERLFEPGYVDVDHIVPYSLSFDDRRSNKVLVLSSENRQKGNRLPLQYLQGKRREDFIVWTNSSVHDYRKRQNLLREKLSGDEAEGFRQRNLQDTQHMARFLYNYISDHLAFAQSEALGKKRVFAVSGAVTSHLRKRWGLSKVRADGDLHHALDAAVVACTTDGMIRRISGYYGHIEGEYLQDADGAGSQHARTKERFPAPWPRFRDELIVRLSEQPAEPLLDINPEFYCEYGTEHIRPVFVSRMPRRKVTGPGHKETIKGAAAADEGLLTVRKALTELKLDKDGEIKDYYMPSSDTLLYEALKAQLRRFGGDGKKAFAEPFYKPKADGTPGPLVRKVKTTEKATLTVPVHGGAASNDTMVRVDVFLVPGDGYYWVPVYTADTLKPELPNRAVVQGKPYSEWKEMREEDFIFSLYPNDLVYVEHKSGLKFTLQNADSTLEKTRTQTSAFAYFVSGSISTASITIRTHDNAYGIPSLGVKTLKTFHKYQVDVLGNVFPVHKETRQKFR

SEQ ID NO: 791 - protein, 951 aa, Sutterella parvirubra
MPTVRPVFHSSASFDLGAKNTGLFLVNHPAGAAPSAEYAAAYTIVQPADGDGLNYSTTNRRAVRHRLRGGKRFKLARRLVLQVIDALRKLKPGLIRDEEMRRTVEALSSLLKRRGFTRIESEAQVDPTTLDSVDPAVFADHETLGGFFSLGIPISTQWDALSQNPGAVEQLFKALPSAKDFGKYVTEQFPEFAEQKKLYADAIKVLSSEAKSIVMQLGLGHHHRSKYFEMIAHDMLRDPRLQGVFELFGSEERFKTFICNVSNLQLRALRWYFDEPNPEVANQWNPEKFQVVWLRGLKYFHPDAERKADMKKLIDELTASKDILDALCTTDPRRTIPPYEDQNNRRPPFDQTLWLSAAELTRRYGDKWRIWSQKFERADRALSTGLDEILLYTDRRSRMFNRNQDPSVYADSYVLQRVLDRSSKLDRYALRALAAGYRTQELHEPLATLSDTLGTQHVETFLTFAAEYYEEVAAAKNGLWLDGPSRLLERADIHPPMKKKVLDLLLGNILDATPEIGRILRTVLWNRHVHEKSRSTPASLCRSIEAIRKDFGGEFRMRYDALDAKIRAAEDQKKKFKPTNAEEKDLFKAWNATKTMHAFLRDVLQLTPKQLERTASPYVFAQLHTLIDTERDGFTSTSLAAHLENHWRMRANAAGMAQCSRLPADAVRPFDGVLSKALDRQAFEAAKLAAQHLMSRKELTDTDIRYSIIIESNRFAFSASTAELKKNTLAKKNAEKGLNFELKRWQDKDSRIREASRGICAYTGAKLGDVVEYDHIIPRAFTTSAMGSVFNSEANLICVSRPGNQTKADKRYGLNKLHKTYLTAVFGTADVTTIAASIEDIVGKLASANRLRHFELLNEKEQDAVRHALFLDDESDARRIVLRELAAQNKSRVNGTQAWFVRAFMTKLLEITKDWRERTGNTLDIRSWKTDAEVASRLRSALNFHAEITLT

SEQ ID NO: 792 - protein, 406 aa, Sutterella parvirubra
SNLFREEVPYGDHFLPIIQMKNRIYIGYQLPKADGTGGNAVAVLGKDPLELLETLKPFLDREPQAFSDHPVTYKMINERAYELLTKCALTPDQTTELERTQAEVLRSLNYQTSRAAVLGRLVDDKNKFVAKDAVWKEKDFVISFKLSPKKSAFKASGQLELPAKSDWKALVDSPELAINWGQPADDTFSQRIERKVRMNSSHLEHTPKKRVVSLPVVDKPSGGFRIRRHNLDGSAVFQVHTVANNKYGGFSADSAGKVDWSTPVLCGHLQHANLVPLDPETASAEQLVRMSEWRVVETTSDIRLEVCPGTSGRRYVRVELPFTLLQEWLTAGKVADVPVSPLHLPGSIKLTDPKTFCAEAQKTLSIFAQPRATIFFEQLGDRVRFRFEASGGPATMNAAYNAAGRS

SEQ ID NO: 793 - protein, 389 aa, Sutterella wadsworthensis
MKACDLEEKTNHLQACVAIDLGARYTGTFSILHKSSHLPSKDDCRAATYVLPEDGGKMTYSQRNRTAVRHRIRGKKRFALARRMAMLIIREKLAAKSVTLTSSETRRLAEAVGSLLRRRGYNRLETETDNDLTVLENIEPEVFSEHEILGKYFYAGTDLAIQWETLSQDLSKISSLLAERLSEKDFKKYLTGLIPDDKNKIKHIISVFKMLIDEAESINMQCVLGHKHRTQYLSDIHADMHRDTRLSKAAEAFGGVDRLWRLLGNLSNLQLRAHRWYFNAPHLFDDQALEPARLQKTLVRAFKYLHCPQGVESRAQAELVKELEEADDIIDALCTIDPVRTIPPYENQQNRRPPFDQTLYLSPDLGVSGFLCLGRLFQGQPNEAALCFL

SEQ ID NO: 794 - protein, 976 aa, Tannerella sp.
MKKILGLDLGSNSIGWALVNEAENRDEASSIIKLGVRVNPLTVDEMQNFEKGKSITTNADRTLKRSMRRNLQRYKLRRDALIKLLKKVGFITDGTILSEQGNRTTFETYRLRAKAPDEEISLQELARVLLMINKKRGYKSSRKIKEKEAGTLIDGMEVAKKLYDEDLTPGQLCLQLLESGKKSLPDFYSSDLQEEFDRIWNFQKQFNPKAFCDTAKEEIKGKNKSQTWAILAKYFIWMEEMDVWNEKESKTERVEKECKLVGLKRTVKKEEQRKENYCWRVQALTEQLDLEKVAVVLQEINGQISTSSGYLGAISDRSKVLYFNRQTVGQYQMAELEKNPNTSLRNMVFYRQDYLDEFDKIWEKQAEFHKELTVELKKEIRDIIIFYQRRLKSQKGLIGFCEFENREIMVEKNGKMQAKVVGCKVIPRSHPLFQEFKIWQTLNNVEVFAGEKKCKRKRTDAFPGLFDGTEDTLMVEGWRYLYQEEKEILAKELSVKKSLKKEYILKLLFDNPQDLDMNFEQIEGNDTGNVLFSAYSKMIEKYGYEPLDFGKPTDKIIEQLQVIFADLGWNTDLLFVDLNKEGKDLEKQPYFKLWHLLYSFEGDNTPTGNGKLVEKLMELCHVGKECALELVNISFQNDYGSLSAKAIKKILPYLKEGNRYDVACGYAGYRHSKSSLTKEEIENKVLKDKLDILPKNSLRNPVVEKILNQMVNVINAIIDTYGKPDEIRVELARELKKSAKEREELTKAIAKSTREHEEIRKVLQEEFGMINVSRNDIIRYKLYKELKDNGYKTLYSNQDIPKEKVFSKEIDIEHIIPQARLFDDSLSNKTLEYKAINIEKGNKTAYDFVKEKYGEKGLQQYLNRCESLFKGHRTKLRKLKMGQENIPEGFIDRDLRNTQYIAKKALAMLNEICRRVVATTGSITDRLREDWQLVDVLKELRCFRYFKDTKMKANHNKNIFYTSIKVDVSDTSKILK

SEQ ID NO: 795 - protein, 1049 aa, Tistrella mobilis
MINERLTFGIDLGIGSCGWAVLRHADAAGEPGVIEGLGSWCFDVPETSKERIPTNQVRRSNRLLRRVIRRRRNRMAEIRRLFHAQGLLPSADEDALKRPRLDPWELRARGLDQCLSAEEFAVALGHIARHRGFRSSAKRKAANTSGEDSKMLSALLVTRERTARYRTVGEMFARDPEYSARRRNRDGIFDRTVARDDLIHEVGKLFEAQRARGSAFASPDLEADFNAIAFRQAEMQDSERLVGNCPFERDEKRAARWAPSFERFRLLTRLINLRIATAEGERRFTPEDLARVSAELGATAKLPVSRVRALIGLLPDERFTTIRVEDEDRDIVARTGEAAPGTWRLRKTLGEALWAEMQARPDQLDAIAHVLSFFEATAKIRSELDRLGLPAAVIEALDRGLEDGAFAKFKGAGHISAKACRNLLPHLQQGHRYDQACRLAGYDHAASTLSHTAQVVSKAGFNALVTELGESIANPIARKALTEGLKQIRAMCARWGLPGAIHIELAREVGNSIEKRRELESQRETTTKRRQTERDEIRGLLALEDVDDDTLLRYRLWKEQGGKCLYTGKDIHVRQLIATDNSVQVDHILPWSRFGDDSFNNKTLCLASANQRKRGQTPWEWFSLTGTPEAWEVFASRVETSKDLRGFKKRNLLLKNADEVAQRFRSRNLNDTRYAARLLAEAAKLFYPAGDRQEKDGRRRVLTRPGPLTAALRHAWGLESLKKADGKRVSDDRHHALDALAVAAISEREVQRLTRSFQEWEQQGLARPLRHVAPPWPGFRGDVLAAYAQAFVARPERRRARGKGHDASIRQVVGEGPEAQVFERRGLADLKEADLDRVKDPERNQAIIEAVRAWILAGRPADAPPRSPRGDVIVKLRTAPAKKIKPAVPVRGGTADRGDMVRIDVFTRPNRKGRDEWYLVPIYPHQVMNRKAWPHPPMRSVVAYKDEAGWTEIGAEHSFRFSLYPRSYVQLVKSNGDVIEGYLVSMDRSTGAFRVFVHNNPAEMAKGIGAKTLLNLRKFNVDRFGVRTEVKSEVRTWHGEVCTSPVPPD

SEQ ID NO: 796 - protein, 1395 aa, Treponema denticola
MKKEIKDYFLGLDVGTGSVGWAVTDTDYKLLKANRKDLWGMRCFETAETAEVRRLHRGARRRIERRKKRIKLLQELFSQEIAKIDEGFFQRMKESPFYAEDKTILQENALFNDKDFTDKTYHKAYPTINHLIKAWIENKVKPDPRLLYLACHNIIKKRGHFLFEGDFDSENQFDTSIQALFEYLREDMEVDIDADSQKVKEILKDSSLKNSEKQSRLNKILGLKPSDKQKKAITNLISGNKINFADLYDNPDLKDAEKNSISFSKDDFDALSDDLASILGDSFELLLKAKAVYNCSVLSKVIGDEQYLSFAKVKIYEKHKTDLTKLKAVIKKHFPNNYKKVFGYNQDNESKNNYSGYVGVCKTKNKKLVINNSVNQEDFYKFLKPILSAKSEIKEVNDILAEIETGNFLPKQISKSNAEIPYQLRKMELEKILSNAEKHFSFLKQKDEKGLSHSEKIIMLLTFKIPYYIGPINDNHKKSFPDRCWVVKKEKSPSGKTTPWNFFDHIDKEKTAEEFITSRTNFCTYLIGESVLPKNSLLYSEYTVLNEINNLQIIIDGKNICDTKLKQKIYEDLFKKYKKITQKQISTFIKHEGICNKTDEVIILGIDKECTSSLKSYIELKNIFGKQVDEISTKNMLEEIIRWATIYDEGEGKTILKTKIKAEYGKYCSDEQIKKILNLKFSGWGRLSRKFLETVTSEMPGFSEPVNIITAMRETQNNLMELLSSEFKFTENIKKINSGFEDAEKQFSYDGLVKPLFLSPSVKKMLWQTLKLVKEISHITQAPPKKIFIEMAKGAELEPARTKTRLKILQDLYSSCKNDADAFSSEIQYLSGKIENEDNLRLRSDKLYLYYTQLGKCMYCGKPIEIGHVFDTSNYDIDHIYPQSKIKDDSISNRVLVCSSCNKNKEDKYPLKSEIQSKQRGFWNFLQRNNFISLEKLNRLTRTTPISDDETAKFIARQLVETRQATKVAAKVLEKMFPETKIVYSKAETVSMFRNKFDIIKCREINDFHHAHDAYLNIVVGNVYNTKFTNNPWNFIKEKRDNPKIADTYNYYKVFDYDVKRNNITAWEKGKTIITVKDMLKRNTPIYTRQAACKKGGLFDQTIMKKGLGQHPLKKEGPFSNISKYGGYNKVSAAYYTLIEYEEKGNKIRSLETIPLYLVKDIQKDQDVLKSYLTDLLGKKEFKILVPKIKINSLLKINGFPCHITGKTNDSFLLRPAVQFCCSNDEVLYFKKIIRFSEIRSQREKIGKTISPYEDLSFRSYIKENLCKKTKNDEIGEKEFYDLLQKKNLEIYDMLLTKHKDTIYKKRPNSATIDILVKGKEKFKSLIIENQFEVILEILKLFSATRNVSELQHIGGSKYSGVAKIGNKISSLDNCILIYQSITGIFEKRIDLLKV

SEQ ID NO: 797 - protein, 769 aa, Treponema denticola
MKKEIKDYFLGLDVGTGSVGWAVTDTDYKLLKANRKDLWGMRCFETAETAEVRRLHRGARRRIERRKKRIKLLQELFSQEIAKIDEGFFQRMKESPFYAEDKTILQENALFNDKDFTDKTYHKAYPTINHLIKAWIENKVKPDPRLLYLACHNIIKKRGHFLFEGDFDSENQFDTSIQALFEYLREDMEVDIDADSQKVKEILKDSSLKNSEKQSRLNKILGLKPSDKQKKAITNLISGNKINFADLYDNPDLKDAEKNSISFSKDDFDALSDDLASILGDSFELLLKAKAVYNCSVLSKVIGDEQYLSFAKVKIYEKHKTDLTKLKAVIKKHFPNNYKKVFGYNQDNESKNNYSGYVGVCKTKNKKLVINNSVNQEDFYKFLKPILSAKSEIKEVNDILAEIETGNFLPKQISKSNAEIPYQLRKMELEKILSNAEKHFSFLKQKDEKGLSHSEKIIMLLTFKIPYYIGPINDNHKKSFPDRCWVVKKEKSPSGKTTPWNFFDHIDKEKTAEEFITSRTNFCTYLIGESVLPKNSLLYSEYTVLNEINNLQIIIDGKNICDTKLKQKIYEDLFKKYKKITQKQISTFIKHEGICNKTDEVIILGIDKECTSSLKSYIELKNIFGKQVDEISTKNMLEEIIRWATIYDEGEGKTILKTKIKAEYGKYCSDEQIKKILNLKFSGWGRLSRKFLETVTSEMPGFSEPVNIITAMRETQNNLMELLSSEFKFTENIKKINSGFEDAEKQFSYDGLVKPLFLSPSVKKCCGRL

SEQ ID NO: 798 - protein, 1395 aa, Treponema denticola
MKKEIKDYFLGLDVGTGSVGWAVTDTDYKLLKANRKDLWGMRCFETAETAEVRRLHRGARRRIERRKKRIKLLQELFSQEIAKIDEGFFQRMKESPFYAEDKTILQENALFNDKDFTDKTYHKAYPTINHLIKAWIENKVKPDPRLLYLACHNIIKKRGHFLFEGDFDSENQFDTSIQALFEYLREDMEVDIDADSQKVKEILKDSSLKNSEKQSRLNKILGLKPSDKQKKAITNLISGNKINFADLYDNPDLKDAEKNSISFSKDDFDALSDDLASILGDSFELLLKAKAVYNCSVLSKVIGDEQYLSFAKVKIYEKHKTDLTKLKAVIKKHFPNNYKKVFGYNQDNESKNNYSGYVGVCKTKNKKLVINNSVNQEDFYKFLKPILSAKSEIKEVNDILAEIETGNFLPKQISKSNAEIPYQLRKMELEKILSNAEKHFSFLKQKDEKGLSHSEKIIMLLTFKIPYYIGPINDNHKKSFPDRCWVVKKEKSPSGKTTPWNFFDHIDKEKTAEEFITSRTNFCTYLIGESVLPKNSLLYSEYTVLNEINNLQIIIDGKNICDTKLKQKIYEDLFKKYKKITQKQISTFIKHEGICNKTDEVIILGIDKECTSSLKSYIELKNIFGKQVDEISTKNMLEEIIRWATIYDEGEGKTILKTKIKAEYGKYCSDEQIKKILNLKFSGWGRLSRKFLETVTSEMPGFSEPVNIITAMRETQNNLMELLSSEFKFTENIKKINSGFEDAEKQFSYDGLVKPLFLSPSVKKMLWQTLKLVKEISHITQAPPKKIFIEMAKGAELEPARTKTRLKILQDLYSSCKNDADAFSSEIQYLSGKIENEDNLRLRSDKLYLYYTQLGKCMYCGKPIEIGHVFDTSNYDIDHIYPQSKIKDDSISNRVLVCSSCNKNKEDKYPLKSEIQSKQRGFWNFLQRNNFISLEKLNRLTRTTPISDDETAKFIARQLVETRQATKVAAKVLEKMFPETKIVYSKAETVSMFRNKFDIIKCREINDFHHAHDAYLNIVVGNVYNTKFTNNPWNFIKEKRDNPKIADTYNYYKVFDYDVKRNNITAWEKGKTIITVKDMLKRNTPIYTRQAACKKGELFNQTIMKKGLGQHPLKKEGPFSNISKYGGYNKVSAAYYTLIEYEEKVNKIRSLETIPLYLVKDIQKDQDVLKSYLTDLLGKKEIKILVPKIKINSLLKINGFPCHITGKTGDSFVLRPAVQFCCSNDEVLYFKKIIRFNEIRSQREKMGKTISPYEDLSFRSYIKENLCKKTKADEIGEKEFYDLLQKKNLEIYDMLLTKHKDTIYNKRPNSTTLGMLTKGRYEFINLKPKDQIIVMLEILKLFCTTREAIDLGLIKGKPAAGVATLGKKISNLDNCILIYQSITGIFEKRIDLLKV

SEQ ID NO: 799 - protein, 1395 aa, Treponema denticola
MKKEIKDYFLGLDVGTGSVGWAVTDTDYKLLKANRKDLWGMRCFETAETAEVRRLHRGARRRIERRKKRIKLLQELFSQEIAKIDEGFFQRMKESPFYAEDKTILQENTLFNDKDFTDKTYHKAYPTINHLIKAWIENKVKPDPRLLYLACHNIIKKRGHFLFEGDFDSENQFDTSIQALFEYLREDMEVDIDADSQKVKEILKDSSLKNSEKQSRLNKILGLKPSDKQKKAITNLISGNKINFADLYDNPDLKDAEKNSISFSKDDFDALSDDLASILGDSFELLLKAKAVYNCSVLSKVIGDEQYLSFAKVKIYEKHKTDLTKLKNVIKKHFPKDYKKVFGYNKNEKNNNNYSGYVGVCKTKSKKLIINNSVNQEDFYKFLKTILSAKSEIKEVNDILTEIETGTFLPKQISKSNAEIPYQLRKMELEKILSNAEKHFSFLKQKDEKGLSHSEKIIMLLTFKIPYYIGPINDNHKKSFPDRCWVIKKEKSPSGKTTPWNFFDHIDKDKTAEAFITSRTNFCTYLVGESVLPKSSLLYSEYTVLNEINNLQIIIDGKNICDIKLKQKIYEELFKKYKKITQKQISTFIKHEGICNKTDEVIILGIDKECTSSLKSYIELKNIFGKQVDEISTKNMLEEIIRWATIYDEGEGKTILKTKIKAEYGKYCSDEQIKKILNLKFSGWGRLSRKFLETVTSEMPGFSEPVNIITAMRETQNNLMELLSSEFKFTENIKKINSGFEDAEKQFSYNGLVKPLFLSPSVKKMLWQTLKLVKEISHITQAPPKKIFIEMAKGAELEPARTKTRLKILQDLYNNCKNDADAFSSEIKDLSGKIENEDNLRLRSDKLYLYYTQLGKCMYCGKPIEIGHVFDTSNYDIDHIYPQSKIKDDSISNRVLVCSSCNKNKEDKYPLKSEIQSKQRGFWNFLQRNNFISLEKLNRLTRTTPISDDETAKFIARQLVETRQATKVAAKVLEKMFPETKIVYSKAETVSMFRNKFDIIKCREINDFHHAHDAYLNIVVGNVYNTKFTNNPWNFIKEKRDNPKIADTYNYYKVFDYDVKRNNITAWEKGKTIITVKDMLKRNTPIYTRQAACKKGGLFDQTIMKKGLGQHPLKKEGAFSNISKYGGYNKVSAAYYTLIEYEEKGNKIRSLETIPLYLVKDIQKDQDVLKSYLTDLLGKKEIKILVPKIKINSLLKINGFPCHITGKTGDSFVLRPAVQFCCSNDEVLYFKKIIRFNEIRSQREKMGKTISPYEDLSFRSYIKENLCKKTKADEIGEKEFYDLLQKKNLEIYDMLLTKHKDTIYNKRPNSTTLGMLTKGRYEFINLKPKDQIIVMLEILKLFCTTREAIDLGLIKGKPAAGVATLGKKISNPDNCILIYQSITGIFEKRIDLLKV

SEQ ID NO: 800 - protein, 1395 aa, Treponema denticola
MKKEIKDYFLGLDVGTGSVGWAVTDTDYKLLKANRKDLWGMRCFETAETAEVRRLHRGARRRIERRKKRIKLLQELFSQEIAKIDEGFFQRMKESPLYAEDKTILQENTLFNDKDFTDKTYHKAYPTINHLIKAWIENKVKPDPRLLYLACHNIIKKRGHFLFEGDFDSENQFDTSIQALFEYLREDMELDIDADSQKVKEILKDSSLKNSEKQSRLNKMLGLKPSDKQKKAITNLISGNKINFADLYDNPDLKDAEKNSISFSKDDFDALSDDLASILGDSFELLLKAKAVYNCSVLSKVIGDEQYLSFAKVKIYEKHKTDLTKLKNVIKKHFPKDYKKVFGYNKNEKNNNNYSAYVGVCKITHKKLVIKNSASQEDFYKFLKTILSAKSEIKEVNDILTEIETGTFLPKQISKSNAEIPYQLRKMELEKILSNAEKHFSFLKQKDEKGLSHSEKIIMLLTFKIPYYIGPINDNHKKSFPDRCWVVKKEKSPSGKTTPWNFFDHIDKEKTAEEFITSRTNFCTYLIGESVLPKSSLLYSEYTVLNEINNLQIIIDGKNICDIKLKQKIYEELFKKYKKITQKQISTFIKHEGICNKTDEVIILGIDKECTSSLKSYIELKNIFGKQVDEISTKNMLEEIIRWATIYDEGEGKTILKTKIKAEYGKYCSDEQIKKILNLKFSGWGRLSRKFLETVTSEMPGFSEPVNIITAMRETQNNLMELLSSEFKFTENIKKINSGFEDAEKQFSYNGLVKPLFLSPSVKKMLWQTLKLVKEISHITQAPPKKIFIEMAKGAELEPARTKTRLKILQDLYSSCKNDADAFSSEIQYLSGKIENEDNLRLRSDKLYLYYTQLGKCMYCGKPIEIGHVFDTSNYDIDHIYPQSKIKDDSISNRVLVCSSCNKNKEDKYPLKAEIQSKQRGFWNFLQRNNFISLEKLNRLTRTSPISDDETAKFIARQLVETRQATKVAAKVLEKMFPETKIVYSKAETVSMFRNKFDIIKCREINDFHHAHDAYLNIVVGNVYNTKFTNNPWNFIKEKRDNPKIADTYNYYKVFDYDVKRNNITAWEKGKTIITVKDMLKRNTPIYTRQAACKKGELFNQTIMKKGLGQHPLKKEGPLSNISKYGGYNKVSAAYYTLIEYEEKGSKIRSLETIPLYLVKDIQKNKDGLKSYLTDQIGKKEIKILIPKIKINSLLKINGFPCHITGKMGEAFVLRPAVQFCCSNDEALYFKKIIRFNEIRKQREKMGKTISPYEDLSFRSYIKDNLCKKTKADEIEEKEFYDLLQKKNLEIYDMLLTKHKDTIYKKRPNSATIDILVKGKEKFKSLIIENQFEVILEILKLFSATRNVSDLQHIGGSKNAGNARVGNKISSLDNCILIYQSITGIFEKRIDLLKI

SEQ ID NO: 801 - protein, 1395 aa, Treponema denticola
MKKEIKDYFLGLDVGTGSVGWAVTDTDYKLLKANRKDLWGMRCFETAETAEVRRLHRGARRRIERRKKRIKLLQELFSQEIAKIDEGFFQRMKESPLYAEDKTILQENTLFNDKDFTDKTYHKAYPTINHLIKAWIENKVKPDPRLLYLACHNIIKKRGHFLFEGDFDSENQFDTSIQALFEYLREDMEVDIDADSQKVKEILKDSSLKNSEKQSRLNKMLGLKPSDKQKKAITNLISGNKINFADLYDNPDLKDAEKNSISFSKDDFDALSDDLASILGDSFELLLKAKAVYNCSVLSKVIGDEQYLSFAKVKIYEKHKTDLTKLKNVIKKHFPKDYKKVFGYNKNEKNNNNYSGYVGVCKTKSKKLIINNSVNQEDFYKFLKTILSAKSEIKEVNDILTEIETGTFLPKQISKSNAEIPYQLRKMELEKILSNAEKHFSFLKQKDEKGLSHSEKIIMLLTFKIPYYIGPINDNHKKSFPDRCWVVKKEKSPSGKTTPWNFFDHIDKEKTAEEFITSRTNFCTYLIGESVLPKNSLLYSEYTVLNEINNLQIIIDGKNICDTKLKQKIYEELFKKYKKITQKQISTFIKHEGICNKTDEVIILGIDKECTSSLKSYIELKNIFGKQVDEISTKNMLEEIIRWATIYDEGEGKTILKTKIKAEYGKYCSDEQIKKILNLKFSGWGRLSRKFLETVTSEMPGFSEPVNIITAMRETQNNLMELLSSEFKFTENIKKINSGFEDVEKQFSYDGLVKPLFLSPSVKKMLWQTLKLVKEISHITQAPPKKIFIEMAKGAELDPVRTKTRLKILQDLYNNCKNDADAFSSEIKDLSGKIENEDNLRLRSDKLYLYYTQLGKCMYCGKPIEIGHVFDTSNYDIDHIYPQSKIKDDSISNRVLVCSSCNKNKEDKYPLKAEIQSKQRGFWNFLQRNNFISLEKFNRLTRATPISDDETAKFIARQLVETRQATKVAARVLEKMFPETKIVYSKAETVSMFRNKFDIVKCREINDFHHAHDAYLNIVVGNVYNTKFTNNLWNFIKEKRDNPKIADTYNYYKVFDYDVKRNNITAWEKGKTIITVKDMLKRNTPIYTRQAACKKGGLFDQTIMKKGLGQHPLKKEGPFSNISKYGGYNKVSAAYYTLIEYEEKGNKIRSLETIPLYLVKDIQKDQDVLKSYLTDLLGKKEFKILVPKIKINSLLKINGFPCHITGKTNDSFLLRPAVQFCCSNDEVLYFKKIIRFSEIRSQREKIGKTISPYEDLSFRSYIKENLCKKTKNDEIGEKEFYDLLQKKNLEIYDMLLTKHKDTIYKKRPNSATIDILVKGKEKFKSLIIENQFEVILEILKLFSATRNVSDLQHIGGSKYSGVAKIGNKISSLDNCILIYQSITGIFEKRIDLLKV

SEQ ID NO: 802 - protein, 357 aa, Treponema denticola
MKKEIKDYFLGLDVGTGSVGWAVTDTDYKLLKANRKDLWGMRCFETAETAEVRRLHRGARRRIERRKKRIKLLQELFSQEIAKTDEGFFQRMKESPFYAEDKTILQENALFNDRDFTDKTYHKAYPTINHLIKAWIENKVKPDPRLLYLACHNIIKKRGHFLFEGDFDSENQFDTSIQAFFEYLREDMEVDIDADSQKIKEILKDSSLKNSEKQSRLNKILGLKSSDKQKKAITNLISGNKINFADLYDNPDLKDAEKNSISFSKDDFDALSDDLASILGDSFELLLKAKAVYNCSVLSKVIGDEQYLSFAKVKIYEKHKTDLTKLKNVIKKHFPKDYKKVFGYNKNEKITTITPDM

SEQ ID NO: 803 - protein, 1395 aa, Treponema denticola
MKKEIKDYFLGLDVGTGSVGWAVTDTDYKLLKANRKDLWGMRCFETAETAEVRRLHRGARRRIERRKKRIKLLQELFSQEIAKTDEGFFQRMKESPFYAEDKTILQENALFNDRDFTDKTYHKAYPTINHLIKAWIENKVKPDPRLLYLACHNIIKKRGHFLFEGDFDSENQFDTSIQALFEYLREDMEVDIDADSQKVKEILKDSSLKNSEKQSRLNKMLGLKPSDKQKKAITNLISGNKINFADLYDNPDLKDAEKNSISFSKDDFDALSDDLASILGDSFELLLKAKAVYNCSVLSKVIGDEQYLSFAKVKIYEKHKTDLTKLKNVIKKHFPNDYKKVFGYNKNEKNNNNYSAYVGVCKTKSKKLVINNTVNQEDFYKFLKPILLAKSEIKEVNDILTEIETGTFLPKQISKSNAEIPYQLRKMELEKILSNAEKHFSFLKQKDEKGLSHSEKIIMLLTFKIPYYIGPINDNHKKSFPDRCWVIKKEKSPSGKTTPWNFFDHIDKDKTAEAFITSRTNFCTYLVGESVLPKNSLLYSEYTVLNEINNLQIIIDGKNICDIKLKQKIYEELFKKYKKITQKQISTFIKHEGICNKTDEVIILGIDKECTSSLKSYIELKNIFGKQVDEISTKNMLEEIIRWATIYDEGEGKTILKTKIKAEYGKYCSDEQIKKILNLKFSGWGRLSRKFLETVTSEMPGFSEPVNIITAMRETQNNLMELLSSEFKFTENIKKINSGFEDVEKQFSYDSLVKPLFLSPSVKKMLWQTLKLVKEISHITQAPPKKIFIEMAKGAELDPVRTKTRLKILQDLYNNCKNDADAFSSEIKDLSGKIENEDNLRLRSDKLYLYYTQLGKCMYCGKPIEIGHVFDTSNYDIDHIYPQSKIKDDSISNRVLVCSSCNKNKEDKYPLKAEIQSKQRGFWNFLQRNNFISLEKLNRLTRTSPISDDETAKFIARQLVETRQATKVAAKVLEKMFPETKIVYSKAETVSMFRNKFDIIKCREINDFHHAHDAYLNIVVGNVYNTKFTNNPWNFIKEKRDNPKIADTYNYYKVFDYDVKRNNITAWEKGKTIITVKDMLKRNTPIYTRQAACKKGELFNQTIMKKGLGQHPLKKEGPLSNISKYGGYNKVSAAYYTLIEYEEKGSKIRSLETIPLYLVKDIQKNKDGLKSYLTDQIGKKEIKILIPKIKINSLLKINGFPCHITGKMGEAFVLRPAVQFCCSNDEALYFKKIIRFNEIRKQREKMGKTISPYEDLSFRSYIKDNLCKKTKADEIEEKEFYDLLQKKNLEIYDMLLTKHKDTIYKKRPNSATIDILVKGKEKFKSLIIENQFEVILEILKLFSATRNVSDLQHIGGSKNAGNARVGNKISSLDNCILIYQSITGIFEKRIDLLKI

SEQ ID NO: 804 - protein, 631 aa, Treponema denticola
MLWQTLKLVKEISHITQAPPKKIFIEMAKGAELEPARTKTRLKILQDLYNNCKNDADAFSSEIKDLSGKIENEDNLRLRSDKLYLYYTQLGKCMYCGKPIEIGHVFDTSNYDIDHIYPQSKIKDDSISNRVLVCSSCNKNKEDKYPLRSEIQSKQRGFWNFLQRNNFISLEKLNRLTRTTPISDDETAKFIARQLVETRQATKVAAKVLEKMFPETKIVYSKAETVSMFRNKFDIVKCREINDFHHAHDAYLNIVVGNIYNTKFTNNPWNFIKEKRDNPKIADTYNYYKVFDYDVKRNNITAWEKGKTIITVKDMLKRNTPIYTRQAACKKGGLFDQTIMKKGLGQHPLKKEGPFSNISKYGGYNKVSAAYYTLIEYEEKENKIRSLETIPLYLVKDIQKSQEKLKSYLTDLLGKKEIKILVPKIKINSLLKINGFPCHITGKTNDSFLLRPAVQFCCSNDEVLYFKKIIRFNEIRSQREKMGKTISPYEDLSFRSYIKENLCKKTKNDEIGEKEFYDLLQKKNLEIYDMLLTKHKDTIYNKRPNSTTLGMLTKGRYEFINLKPKDQIIVMLEILKLFCTTREAIDLGLIKGKPAAGVATLGKKISNLDNCILIYQSITGIFEKRIDLLKV

SEQ ID NO: 805 - protein, 631 aa, Treponema denticola
MLWQTLKLVKEISHITQAPPKKIFIEMAKGAELEPARTKTRLKILQDLYSSCKNDADAFSSEIQYLSGKIENEDNLRLRSDKLYLYYTQLGKCMYCGKPIEIGHVFDTSNYDIDHIYPQSKIKDDSISNRVLVCSSCNKNKEDKYPLKSEIQSKQRGFWNFLQRNNFISLEKLNRLTRTTPISDDETAKFIARQLVETRQATKVAAKVLEKMFPETKIVYSKAETVSMFRNKFDIIKCREINDFHHAHDAYLNIVVGNVYNTKFTNNPWNFIKEKRDNPKIADTYNYYKVFDYDVKRNNITAWEKGKTIITVKDMLKRNTPIYTRQAACKKGELFNQTIMKKGLGQHPLKKEGPFSNISKYGGYNKVSAAYYTLIEYEEKVNKIRSLETIPLYLVKDIQKDQDVLKSYLTDLLGKKEIKILVPKIKINSLLKINGFPCHITGKTGDSFVLRPAVQFCCSNDEVLYFKKIIRFNEIRSQREKMGKTISPYEDLSFRSYIKENLCKKTKADEIGEKEFYDLLQKKNLEIYDMLLTKHKDTIYNKRPNSTTLGMLTKGRYEFINLKPKDQIIVMLEILKLFCTTREAIDLGLIKGKPAAGVATLGKKISNLDNCILIYQSITGIFEKRIDLLKV

SEQ ID NO: 806 - protein, 370 aa, Treponema denticola
MTEIETGTFLPKQISKSNAEIPYQLRKMELEKILSNAEKHFSFLKQKDEKGLSHSEKIIMLLTFKIPYYIGPINDNHKKSFPDRCWVVKKEKSPSGKTTPWNFFDHIDKEKTAEEFITSRTNFCTYLVGESVLPKSSLLYSEYTVLNEINNLQIIIDGKNICDIKLKQKIYEELFKKYKKITQKQISTFIKHEGICNKTDEVIILGIDKECTSSLKSYIELKNIFGKQVDEISTKNMLEDIIRWAAIYDEGEGKTILKTKIKAEYGKYCSDEQIKKILNLKFSGWGRLSRKFLETVTSEMPGFSEPVNIITAMRETQNNLMELLSSEFKFTENIKKINSGFEDVEKQFSYDGLVKPLFLSPSVKKCCGRL

SEQ ID NO: 807 - protein, 591 aa, Treponema phagedenis
MARGKEAEKGRTSSRYASIKALYENCKQDLADYDAVLEQFKSEEPLRLRSDKLYLYYTQLGRCMYTGRVIDIDRLMSDNSAYDIDHIYPRSKIKDDSLTNRVLVVKDANQDKRDEPLSPQIQDKQKGFWDFLKHNNFISIEKYERLTYRGYFTEEMLSGFIARQLVETRQGTKTAGQILEQLYPDSTVVYCKAANTSEFRQKFNLIKCREINDLHHAHDAYLNIAVGNVYYTKFTSNPRNFMKLKEPYNLRELFDRDVERNNTIAWVKNKTITTIKDMLKRNTPLYTRYAYCKTGGFFDQNIMKKGKGQFPLKENSPLSDISKYGGYNKVSGAYFILVQKKEKDAVVRILETVPLYLLNKPGKESENVREYLSTALGTKDFKILIPKIKINSLFKINGFLVHITGKTNDRFLVRSAVQFFCDDNLTLFFKRIIAFNGLRNLNKDKSMTAYDDNTMRVYVRGNLFKDKNQLFDKNKFNEIVKGKNISVYKDMVKRYETSIYKFRPNTAVIPILKSGEDKFINLPIEEQFKILQEILKLFGAINGTANLTLIGGRPSTGEMKISNNISNLKQCILIHQSPTGVFEQQIDLLKI

SEQ ID NO: 808 - protein, 1062 aa, Treponema sp.
MIMKLEKWRLGLDLGTNSIGWSVFSLDKDNSVQDLIDMGVRIFSDGRDPKTKEPLAVARRTARSQRKLIYRRKLRRKQVFKFLQEQGLFPKTKEECMTLKSLNPYELRIKALDEKLEPYELGRALFNLAVRRGFKSNRKDGSREEVSEKKSPDEIKTQADMQTHLEKAIKENGCRTITEFLYKNQGENGGIRFAPGRMTYYPTRKMYEEEFNLIRSKQEKYYPQVDWDDIYKAIFYQRPLKPQQRGYCIYENDKERTFKAMPCSQKLRILQDIGNLAYYEGGSKKRVELNDNQDKVLYELLNSKDKVTFDQMRKALCLADSNSFNLEENRDFLIGNPTAVKMRSKNRFGKLWDEIPLEEQDLIIETIITADEDDAVYEVIKKYDLTQEQRDFIVKNTILQSGTSMLCKEVSEKLVKRLEEIADLKYHEAVESLGYKFADQTVEKYDLLPYYGKVLPGSTMEIDLSAPETNPEKHYGKISNPTVHVALNQTRVVVNALIKEYGKPSQIAIELSRDLKNNVEKKAEIARKQNQRAKENIAINDTISALYHTAFPGKSFYPNRNDRMKYRLWSELGLGNKCIYCGKGISGAELFTKEIEIEHILPFSRTLLDAESNLTVAHSSCNAFKAERSPFEAFGTNPSGYSWQEIIQRANQLKNTSKKNKFSPNAMDSFEKDSSFIARQLSDNQYIAKAALRYLKCLVENPSDVWTTNGSMTKLLRDKWEMDSILCRKFTEKEVALLGLKPEQIGNYKKNRFDHRHHAIDAVVIGLTDRSMVQKLATKNSHKGNRIEIPEFPILRSDLIEKVKNIVVSFKPDHGAEGKLSKETLLGKIKLHGKETFVCRENIVSLSEKNLDDIVDEKIKSKVKDYVAKHKGQKIEAVLSDFSKENGIKKVRCVNRVQTPIEITSGKISRYLSPEDYFAAVIWEIPGEKKTFKAQYIRRNEVEKNSKGLNVVKPAVLENGKPHPAAKQVCLLHKDDYLEFSDKGKMYFCRIAGYAATNNKLDIRPVYAVSYCADWINSTNETMLTGYWKPTPTQNWVSVNVLFDKQKARLVTVSPIGRVFRK

SEQ ID NO: 809 - protein, 281 aa, Treponema vincentii
MKTLGLDIGTNSIGWGIVDETANKIEDCGVYIFPEGVKKEKGNESSKAAERTSFRLARRLKFRRKLRKCETLKVLIKNKMCPLTMEELEKWRKQKIYPVSQDFLNWYRTDELKNWEPYFLRKKCAEQKAGPYEIGRALYHLAQRRGFLSNRKESTKASDGKVSKSIDELSSLMDGRTLGQYFYELKQSGEKVRGKYTSRKEHYEKEFNKICEVQEISPELKDDLYRAIFFQRKLKSQKFLVGKCTFERNKPRAPISHFEFEEFRMLSFINSIKIAKKLRRR

SEQ ID NO: 810 - protein, 675 aa, unidentified
  source 1..675: note = uncultured bacterium
MTAENYSNVRFAFDIGTNSIGWAVFQLNDKQEATSILNAGARIFSDGRDPKTFEPLAVRRRNVRSASRMRDRYLRRRKRTLDKLIGYGLLPEDKAERDKILLETNDKPSGSTDKKTDPYSLRARALEEKLPLAYVARALFHIGQRRGFKSNRKADRKSNEKGKIAAGIEELSGLMHQSHAPTLGAYLAKRREEGHVVRLRASSEALTNKAYAFYPERAMLEDEFHKIWQAQAEYYPDVLTKEREEELFHVMFFQRPLKEQKVGLCTLVEGELRLPKSDPLFQQFRLYKEINELAIILPDLSQRKLTMEERDTLITLMRPAKTKTFAALRKALKIPAGGRFNKETENRKQLTGDEVYSVFSKPELFGGDWAKFSIEQQREIIDQLNNEENPDKLEEWLKNKFPKLSDEQRSEIINANLPDGYGRFGITATSKILEQLKKDVISEAEAAHRCGFDHSLANRNWKGLDELPRYQEVLERHIVPGTGDKNDIYDIYKGRLTNPTVHIGLNQVRRLTNRLIKAYGKPWQIVVELARDLPMSSEERKEHNKTLNDNIKAGFERTQKLERLGQKDNANNRLLLKLWEELGKDPDDRKSIYSGTRITEPMLFSGEVEIDHILPFSLTYDDSYANKILCLREENRIKRNRAPADVTEWKDRYDEIIGRSKNCQRTNKNVLGPMQ

SEQ ID NO: 811 - protein, 1017 aa, unidentified
  source 1..1017: note = uncultured bacterium
MRVDSLGRCLSDEEWARVIYHLCKHRGFHWISRAEAKQTEGDSKSEGGKVKQGLAGTAKLMDEKGYRSAAEMVLAEFPEAQRNKQGEYRKALSRELLAKELALLFARQRVFGNRHATDTLETAILGNSDKKSGLFWQQKPALAGADLLKMLGTCTFEKNEYRAPKASFTAERHVWLTRLNNLRIVTDGITRQLTEQERQLVLPLPYRQAGDLTYKQLGMALTKAGLLEAGCFKFIGLAYPTEAQKAEGKTKDPESATLVKIPAWQELRQTLNKASLNDEWEKLSGDALCGQPEIFDKIAWILSVYKDDDEVRTELAKLVLPNPEGLTEALLNIRFDKFHALSLKALRAIVPHMEKGLRYDEACVQAGYHHSQLHKIGEGEHKYLPPLYDGRDGDGRMIFAEDADIPRNPVVLRSLNQARKVVNAIIRRYGSPSAVHIEMARDLSRPFDERNKIKKDQDEYQARNQRDREQFIELFGHPPKGLEFEKWRLYREQNGQCAYSQKPLASSGDVAEIFLDGSTEIDHALPYSRSFDDSKNNKVLVLTRENRDKGNRTPYEYLGGAENSERWQRFFSFVESNKAYRLAKRTRLLRKDFGAKESEEFRERNLNDTRYVCRFFKNYVEQHLKLAEGSEAKRCVVVSGQLTNFLRTRWGLLKIRSDSDRHHALDAAVVAACSHSMVQRLSNYSRTRELEQVRDGFVNIETGEIVNPAMHQQLREHFPDPWPYFRHELEARLKIDSPALLREEMARLSSYTEEELAALKPLFVSRAPQRRNGGAAHKDTIYGQPEKLKKNGSVSQKVALASLALKDIDLLADPHRNAKLYGAIRERLEAHGGKGDKAFPATNPLRKPDKEGNPTGPIVRTVTKVIDKLSGIPVRGGIAKNDTMLRVDVFTKAGRFHLVPVYVHHRVTGLPNQAITRGKDENQWAIIDDTFEWRFSLYPNDLVQIRLKDETHLGYYASTDRSTSSISIWAHDRNQSVGKDGLIRSIGVTTAKDIEKFHVDTLGNVYPAPPEKRRGLA

SEQ ID NO: 812 - protein, 600 aa, unidentified
  source 1..600: note = uncultured bacterium
VNAIIKKHGSLSAVHIEMARDLSRPLDERREVKKLQEEFKDRNDKARESFEADHGYRPKGIVFEKWMLYREQHGKCAYSMEGLDIDRVLNDANYAQIDHALPYSRSYDDSKNNKVLVLTRENQNKGNRTAYEYLTSFAGGEDGDRWRNYAAWVNSNKSYRMAKRNRLLRKNYGPDEASGFKDRNLNDTRYICKFFKNYVEEHLQLAPRADGNANKRCVVVNGQLTAFLRARWGLSKVRSESDRHHALDAAVVAACSHGMVKALADYARNKEVAYLREGFPDPETGEIINPEAHARGVHHFPEPWAHFRHELQVRLYSDDLQALREDLQRLGTYSEQDLLGVRTLFVSRAPQRRNDGAVHKETIYAQPEALRKQGGVVQKVPLTSLSLKDLDNLADPHRNAKLYTALRARLEAHGGKADKAFGPDQPFYKPDKNGNPTGPIVRTIKLVIDKLSGIPIRGGVAKNDTMLRVDVFTKAGKFHLVPVYVHHRVTGLPDRAIVAFKDEVEWTQVDDSFKFLFSIHPNDLIRIGLKAKEPMIGYFASCHRGTGAFNVWSHDRNTSVGKSGSVEGIGIKTALSLEKLNIDVLGNVYPARPEQRHGLA

SEQ ID NO: 813 - protein, 1011 aa, unidentified
  source 1..1011: note = uncultured delta proteobacterium HF0070_07E19
MSSKAIDSLEQLDLFKPQEYTLGLDLGIKSIGWAILSGERIANAGVYLFETAEELNSTGNKLISKAAERGRKRRIRRMLDRKARRGRHIRYLLEREGLPTDELEEVVVHQSNRTLWDVRAEAVERKLTKQELAAVLFHLVRHRGYFPNTKKLPPDDESDSADEEQGKINRATSRLREELKASDCKTIGQFLAQNRDRQRNREGDYSNLMARKLVFEEALQILAFQRKQGHELSKDFEKTYLDVLMGQRSGRSPKLGNCSLIPSELRAPSSAPSTEWFKFLQNLGNLQISNAYREEWSIDAPRRAQIIDACSQRSTSSYWQIRRDFQIPDEYRFNLVNYERRDPDVDLQEYLQQQERKTLANFRNWKQLEKIIGTGHPIQTLDEAARLITLIKDDEKLSDQLADLLPEASDKAITQLCELDFTTAAKISLEAMYRILPHMNQGMGFFDACQQESLPEIGVPPAGDRVPPFDEMYNPVVNRVLSQSRKLINAVIDEYGMPAKIRVELARDLGKGRELRERIKLDQLDKSKQNDQRAEDFRAEFQQAPRGDQSLRYRLWKEQNCTCPYSGRMIPVNSVLSEDTQIDHILPISQSFDNSLSNKVLCFTEENAQKSNRTPFEYLDAADFQRLEAISGNWPEAKRNKLLHKSFGKVAEEWKSRALNDTRYLTSALADHLRHHLPDSKIQTVNGRITGYLRKQWGLEKDRDKHTHHAVDAIVVACTTPAIVQQVTLYHQDIRRYKKLGEKRPTPWPETFRQDVLDVEEEIFITRQPKKVSGGIQTKDTLRKHRSKPDRQRVALTKVKLADLERLVEKDASNRNLYEHLKQCLEESGDQPTKAFKAPFYMPSGPEAKQRPILSKVTLLREKPEPPKQLTELSGGRRYDSMAQGRLDIYRYKPGGKRKDEYRVVLQRMIDLMRGEENVHVFQKGVPYDQGPEIEQNYTFLFSLYFDDLVEFQRSADSEVIRGYYRTFNIANGQLKISTYLEGRQDFDFFGANRLAHFAKVQVNLLGKVIK

SEQ ID NO: 814 - protein, 1011 aa, unidentified; identical to SEQ ID NO: 813
  source 1..1011: note = uncultured delta proteobacterium HF0070_07E19

SEQ ID NO: 815 - protein, 1120 aa, Veillonella sp.
MGFKANLVNLFTDEDIEVILPEEKEFKSINLHEGIYEDVRDAYEDAWGDRFAIVDQCKVLHDIIVISSIIKPGQSLSEAKIESYNQHKEDLVLLKSVLKEDRKLYDDMFVVDTDKGTNYVKYTKQGVNGNTSATQEEFYKYVRKVVSVLPETEHTRRIVQKLEEGTFLPLQRISKNGVVPYQLHKEELVRILDKATVNFPFLNKVENGLTVADKIISILEFKIPYYVGPLNPTHSIENGGFAWVVRKEAGQVLPWNFEQKVDVQASAVKFIENLTNKCTYLIDQDVLPKYSLLYAEFSLLNELNNIRVNDKPLPADVKQAFIRDHFISLQDSKTATKKVVAKYLVDNNYVSQPPIITGMDQQIATKLTSHRDMTRILGEHFDHAMAEDIIRYITIFGESKDMLRQVLKNYYGDRLTTEQIKKLGKLTYTGWGRLSKKFLSDIWGMKKNDDDAEAGTIIEHMREGQENLMQLLSSSYSFIDVVQEYVTNVLGEKEKTAFEMLEDLSLSPMVKRSVWQTLRILDEIVSIRKELPKKIFVEVARTNKADKKRTQSRKALLEELYKQIKDEDVHVLQQELESKEDSALNSKKLYLYFTQMGRCMYSGRRIDIHELFTDKYDIDHIYPRSLTKDDSWHNIVLVEKQLNAEKTDRFPILSAIQSKQKGFWKLLWDRGFISEKKYDRLVRTTDLTDEELNQFINRQMVSTNQSVKAVTTLLHQLYPETEVVFSKAENVSDFRHDYDFVKVRSINHHHHAKDAYLNIVVGNVYHEKFTKNFLSFAKQKGTRRTYNLTKIFEYEIKLTEESKKVIWDPNIHMDIVKKMMKSNDVRVTQRAVPQKGGLSDETIYKKGIAKRGVYLPLKSSDERVRDVEKYGGRTSITISEYIILNIRDTSDQDRIEIFSLPLYIAGKKDIHKAIEEAYLSTCKKPASVVDIQILYRGLYIGSKVNINGFTYYMGGKTGSNVSIDSAVDVVMDITSSVYIKLLEKVAIKKIENPKTFRIENIKTSYNHKEVTVSKEQNIALYQELLKKLDTPLFSKMKGNKLEEFRTVGFDTFIALSLEEQASVLLEVLNVLTNFKTKRDITKIGMTSSRSTLGINISNTEQFSVITTSITGLYEQEIKIK

SEQ ID NO: 816 - protein, 983 aa, Verminephrobacter aporrectodeae
MRRRRDRLLKRKARMHDQLMRHGFFPADAAGRKVLERLNPYQLRAKGLHQALTPGEFARALFHINQRRGFQSNRKTDRKDNESGALKQAISELRAQIHDSGCATVGEWFWKERMQQKPEGVHRQGVRARYRETPYTTDEGRQRIDKRYDLYVDRAMIEQEFDALWAVQAALQPGLFTDAACKELRYTLLFQRKLRPVKPGRCTLLPEEERAPLALPSTQRFRILQEVNHLRLLDEALREVPLTLAQRDALVAALESQGKLGFAPMRKLLKLPGTVKFNLEDEKRTELKGNATSAILARKDLFGPAWAGFDAALQDEIVWQLVSEEGEGRLIAWLQQHTGVDEARAEAIADTSLPEGYGSLSRKALERIVPALQREVCSYDKAVQAAGFAHHSDLGFDFEHSGDEVQQVGERIIASTGEVRPLFAFKQLPYYGKALQRHVAFGSGKPEDPEEKRHGKIANPTVHIGLNQVRTVVNALIRRYGRPSEVVVELARDLKQSREQQQETQRKQAENQRRNTRIRERIAETLGISPERVRSSDIQKWILWEELSFDVVDRRCPYSGEQISTTMLLSPKVEIEHILPFSQTLDDSLNNRTVALREANRIKRNRTPWDARADFEARGWSYEGILHRAERMPLRKRYRFAPDGYQRWLGEDKDFLARALNDTRYLSRVAANYLRLVCPKPQGVRVIPGRMTAMLRAKFGLNDVLGLDGEKNRNDHRHHAVDACVIGVTDQGLMQRFARASAQAREDGLTRLVQDMPLPWPSYRDHVERAVRHIWVSHKPDHGFEGAMMEETAYGIRKDGSIKPRRKADGSAGREVVNLIRITESRQPVRHGVDSQGQPLPYKGYVGGSNYCIEITANDQGKWEGAVISTFEAYRIVRASGWGRLRHCSHGQNGRPLMMRLMIGDAVRLALDGSEKTMRVVKISANGQVFLVAPNEANVDARNRDKADPFAYVSKKAGSFQSAKARQVSISPIGELRDPGFKG

SEQ ID NO: 817 - protein, 1300 aa, Francisella tularensis
MSIYQEFVNKYSLSKTLRFELIPQGKTLENIKARGLILDDEKRAKDYKKAKQIIDKYHQFFIEEILSSVCISEDLLQNYSDVYFKLKKSDDDNLQKDFKSAKDTIKKQISEYIKDSEKFKNLFNQNLIDAKKGQESDLILWLKQSKDNGIELFKANSDITDIDEALEIIKSFKGWTTYFKGFHENRKNVYSSNDIPTSIIYRIVDDNLPKFLENKAKYESLKDKAPEAINYEQIKKDLAEELTFDIDYKTSEVNQRVFSLDEVFEIANFNNYLNQSGITKFNTIIGGKFVNGENTKRKGINEYINLYSQQINDKTLKKYKMSVLFKQILSDTESKSFVIDKLEDDSDVVTTMQSFYEQIAAFKTVEEKSIKETLSLLFDDLKAQKLDLSKIYFKNDKSLTDLSQQVFDDYSVIGTAVLEYITQQIAPKNLDNPSKKEQELIAKKTEKAKYLSLETIKLALEEFNKHRDIDKQCRFEEILANFAAIPMIFDEIAQNKDNLAQISIKYQNQGKKDLLQASAEDDVKAIKDLLDQTNNLLHKLKIFHISQSEDKANILDKDEHFYLVFEECYFELANIVPLYNKIRNYITQKPYSDEKFKLNFENSTLANGWDKNKEPDNTAILFIKDDKYYLGVMNKKNNKIFDDKAIKENKGEGYKKIVYKLLPGANKMLPKVFFSAKSIKFYNPSEDILRIRNHSTHTKNGSPQKGYEKFEFNIEDCRKFIDFYKQSISKHPEWKDFGFRFSDTQRYNSIDEFYREVENQGYKLTFENISESYIDSVVNQGKLYLFQIYNKDFSAYSKGRPNLHTLYWKALFDERNLQDVVYKLNGEAELFYRKQSIPKKITHPAKEAIANKNKDNPKKESVFEYDLIKDKRFTEDKFFFHCPITINFKSSGANKFNDEINLLLKEKANDVHILSIDRGERHLAYYTLVDGKGNIIKQDTFNIIGNDRMKTNYHDKLAAIEKDRDSARKDWKKINNIKEMKEGYLSQVVHEIAKLVIEYNAIVVFEDLNFGFKRGRFKVEKQVYQKLEKMLIEKLNYLVFKDNEFDKTGGVLRAYQLTAPFETFKKMGKQTGIIYYVPAGFTSKICPVTGFVNQLYPKYESVSKSQEFFSKFDKICYNLDKGYFEFSFDYKNFGDKAAKGKWTIASFGSRLINFRNSDKNHNWDTREVYPTKELEKLLKDYSIEYGHGECIKAAICGESDKKFFAKLTSVLNTILQMRNSKTGTELDYLISPVADVNGNFFDSRQAPKNMPQDADANGAYHIGLKGLMLLGRIKNNQEGKKLNLVIKNEEYFEFVQNRNN

SEQ ID NO: 818 - protein, 1307 aa, unidentified
MTQFEGFTNLYQVSKTLRFELIPQGKTLKHIQEQGFIEEDKARNDHYKELKPIIDRIYKTYADQCLQLVQLDWENLSAAIDSYRKEKTEETRNALIEEQATYRNAIHDYFIGRTDNLTDAINKRHAEIYKGLFKAELFNGKVLKQLGTVTTTEHENALLRSFDKFTTYFSGFYENRKNVFSAEDISTAIPHRIVQDNFPKFKENCHIFTRLITAVPSLREHFENVKKAIGIFVSTSIEEVFSFPFYNQLLTQTQIDLYNQLLGGISREAGTEKIKGLNEVLNLAIQKNDETAHIIASLPHRFIPLFKQILSDRNTLSFILEEFKSDEEVIQSFCKYKTLLRNENVLETAEALFNELNSIDLTHIFISHKKLETISSALCDHWDTLRNALYERRISELTGKITKSAKEKVQRSLKHEDINLQEIISAAGKELSEAFKQKTSEILSHAHAALDQPLPTTLKKQEEKEILKSQLDSLLGLYHLLDWFAVDESNEVDPEFSARLTGIKLEMEPSLSFYNKARNYATKKPYSVEKFKLNFQMPTLASGWDVNKEKNNGAILFVKNGLYYLGIMPKQKGRYKALSFEPTEKTSEGFDKMYYDYFPDAAKMIPKCSTQLKAVTAHFQTHTTPILLSNNFIEPLEITKEIYDLNNPEKEPKKFQTAYAKKTGDQKGYREALCKWIDFTRDFLSKYTKTTSIDLSSLRPSSQYKDLGEYYAELNPLLYHISFQRIAEKEIMDAVETGKLYLFQIYNKDFAKGHHGKPNLHTLYWTGLFSPENLAKTSIKLNGQAELFYRPKSRMKRMAHRLGEKMLNKKLKDQKTPIPDTLYQELYDYVNHRLSHDLSDEARALLPNVITKEVSHEIIKDRRFTSDKFFFHVPITLNYQAANSPSKFNQRVNAYLKEHPETPIIGIDRGERNLIYITVIDSTGKILEQRSLNTIQQFDYQKKLDNREKERVAARQAWSVVGTIKDLKQGYLSQVIHEIVDLMIHYQAVVVLENLNFGFKSKRTGIAEKAVYQQFEKMLIDKLNCLVLKDYPAEKVGGVLNPYQLTDQFTSFAKMGTQSGFLFYVPAPYTSKIDPLTGFVDPFVWKTIKNHESRKHFLEGFDFLHYDVKTGDFILHFKMNRNLSFQRGLPGFMPAWDIVFEKNETQFDAKGTPFIAGKRIVPVIENHRFTGRYRDLYPANELIALLEEKGIVFRDGSNILPKLLENDDSHAIDTMVALIRSVLQMRNSNAATGEDYINSPVRDLNGVCFDSRFQNPEWPMDADANGAYHIALKGQLLLNHLKESKDLKLQNGISNQDWLAYIQELRN

SEQ ID NO: 819 - protein, 1246 aa, unidentified
MLKNVGIDRLDVEKGRKNMSKLEKFTNCYSLSKTLRFKAIPVGKTQENIDNKRLLVEDEKRAEDYKGVKKLLDRYYLSFINDVLHSIKLKNLNNYISLFRKKTRTEKENKELENLEINLRKEIAKAFKGNEGYKSLFKKDIIETILPEFLDDKDEIALVNSFNGFTTAFTGFFDNRENMFSEEAKSTSIAFRCINENLTRYISNMDIFEKVDAIFDKHEVQEIKEKILNSDYDVEDFFEGEFFNFVLTQEGIDVYNAIIGGFVTESGEKIKGLNEYINLYNQKTKQKLPKFKPLYKQVLSDRESLSFYGEGYTSDEEVLEVFRNTLNKNSEIFSSIKKLEKLFKNFDEYSSAGIFVKNGPAISTISKDIFGEWNVIRDKWNAEYDDIHLKKKAVVTEKYEDDRRKSFKKIGSFSLEQLQEYADADLSVVEKLKEIIIQKVDEIYKVYGSSEKLFDADFVLEKSLKKNDAVVAIMKDLLDSVKSFENYIKAFFGEGKETNRDESFYGDFVLAYDILLKVDHIYDAIRNYVTQKPYSKDKFKLYFQNPQFMGGWDKDKETDYRATILRYGSKYYLAIMDKKYAKCLQKIDKDDVNGNYEKINYKLLPGPNKMLPKVFFSKKWMAYYNPSEDIQKIYKNGTFKKGDMFNLNDCHKLIDFFKDSISRYPKWSNAYDFNFSETEKYKDIAGFYREVEEQGYKVSFESASKKEVDKLVEEGKLYMFQIYNKDFSDKSHGTPNLHTMYFKLLFDENNHGQIRLSGGAELFMRRASLKKEELVVHPANSPIANKNPDNPKKTTTLSYDVYKDKRFSEDQYELHIPIAINKCPKNIFKINTEVRVLLKHDDNPYVIGIDRGERNLLYIVVVDGKGNIVEQYSLNEIINNFNGIRIKTDYHSLLDKKEKERFEARQNWTSIENIKELKAGYISQVVHKICELVEKYDAVIALEDLNSGFKNSRVKVEKQVYQKFEKMLIDKLNYMVDKKSNPCATGGALKGYQITNKFESFKSMSTQNGFIFYIPAWLTSKIDPSTGFVNLLKTKYTSIADSKKFISSFDRIMYVPEEDLFEFALDYKNFSRTDADYIKKWKLYSYGNRIRIFRNPKKNNVFDWEEVCLTSAYKELFNKYGINYQQGDIRALLCEQSDKAFYSSFMALMSLMLQMRNSITGRTDVDFLISPVKNSDGIFYDSRNYEAQENAILPKNADANGAYNIARKVLWAIGQFKKAEDEKLDKVKIAISNKEWLEYAQTSVKH

SEQ ID NO: 820 - protein, 1246 aa, Porphyromonas macacae
MKTQHFFEDFTSLYSLSKTIRFELKPIGKTLENIKKNGLIRRDEQRLDDYEKLKKVIDEYHEDFIANILSSFSFSEEILQSYIQNLSESEARAKIEKTMRDTLAKAFSEDERYKSIFKKELVKKDIPVWCPAYKSLCKKFDNFTTSLVPFHENRKNLYTSNEITASIPYRIVHVNLPKFIQNIEALCELQKKMGADLYLEMMENLRNVWPSFVKTPDDLCNLKTYNHLMVQSSISEYNRFVGGYSTEDGTKHQGINEWINIYRQRNKEMRLPGLVFLHKQILAKVDSSSFISDTLENDDQVFCVLRQFRKLFWNTVSSKEDDAASLKDLFCGLSGYDPEAIYVSDAHLATISKNIFDRWNYISDAIRRKTEVLMPRKKESVERYAEKISKQIKKRQSYSLAELDDLLAHYSEESLPAGFSLLSYFTSLGGQKYLVSDGEVILYEEGSNIWDEVLIAFRDLQVILDKDFTEKKLGKDEEAVSVIKKALDSALRLRKFFDLLSGTGAEIRRDSSFYALYTDRMDKLKGLLKMYDKVRNYLTKKPYSIEKFKLHFDNPSLLSGWDKNKELNNLSVIFRQNGYYYLGIMTPKGKNLFKTLPKLGAEEMFYEKMEYKQIAEPMLMLPKVFFPKKTKPAFAPDQSVVDIYNKKTFKTGQKGFNKKDLYRLIDFYKEALTVHEWKLFNFSFSPTEQYRNIGEFFDEVREQAYKVSMVNVPASYIDEAVENGKLYLFQIYNKDFSPYSKGIPNLHTLYWKALFSEQNQSRVYKLCGGGELFYRKASLHMQDTTVHPKGISIHKKNLNKKGETSLFNYDLVKDKRFTEDKFFFHVPISINYKNKKITNVNQMVRDYIAQNDDLQIIGIDRGERNLLYISRIDTRGNLLEQFSLNVIESDKGDLRTDYQKILGDREQERLRRRQEWKSIESIKDLKDGYMSQVVHKICNMVVEHKAIVVLENLNLSFMKGRKKVEKSVYEKFERMLVDKLNYLVVDKKNLSNEPGGLYAAYQLTNPLFSFEELHRYPQSGILFFVDPWNTSLTDPSTGFVNLLGRINYTNVGDARKFFDRFNAIRYDGKGNILFDLDLSRFDVRVETQRKLWTLTTFGSRIAKSKKSGKWMVERIENLSLCFLELFEQFNIGYRVEKDLKKAILSQDRKEFYVRLIYLFNLMMQIRNSDGEEDYILSPALNEKNLQFDSRLIEAKDLPVDADANGAYNVARKGLMVVQRIKRGDHESIHRIGRAQWLRYVQEGIVE

SEQ ID NO: 821 - protein, 1326 aa, Prevotella disiens
MKVMENYQEFTNLFQLNKTLRFELKPIGKTCELLEEGKIFASGSFLEKDKVRADNVSYVKKEIDKKHKIFIEETLSSFSISNDLLKQYFDCYNELKAFKKDCKSDEEEVKKTALRNKCTSIQRAMREAISQAFLKSPQKKLLAIKNLIENVFKADENVQHFSEFTSYFSGFETNRENFYSDEEKSTSIAYRLVHDNLPIFIKNIYIFEKLKEQFDAKTLSEIFENYKLYVAGSSLDEVFSLEYFNNTLTQKGIDNYNAVIGKIVKEDKQEIQGLNEHINLYNQKHKDRRLPFFISLKKQILSDREALSWLPDMFKNDSEVIKALKGFYIEDGFENNVLTPLATLLSSLDKYNLNGIFIRNNEALSSLSQNVYRNFSIDEAIDANAELQTFNNYELIANALRAKIKKETKQGRKSFEKYEEYIDKKVKAIDSLSIQEINELVENYVSEFNSNSGNMPRKVEDYFSLMRKGDFGSNDLIENIKTKLSAAEKLLGTKYQETAKDIFKKDENSKLIKELLDATKQFQHFIKPLLGTGEEADRDLVFYGDFLPLYEKFEELTLLYNKVRNRLTQKPYSKDKIRLCFNKPKLMTGWVDSKTEKSDNGTQYGGYLFRKKNEIGEYDYFLGISSKAQLFRKNEAVIGDYERLDYYQPKANTIYGSAYEGENSYKEDKKRLNKVIIAYIEQIKQTNIKKSIIESISKYPNISDDDKVTPSSLLEKIKKVSIDSYNGILSFKSFQSVNKEVIDNLLKTISPLKNKAEFLDLINKDYQIFTEVQAVIDEICKQKTFIYFPISNVELEKEMGDKDKPLCLFQISNKDLSFAKTFSANLRKKRGAENLHTMLFKALMEGNQDNLDLGSGAIFYRAKSLDGNKPTHPANEAIKCRNVANKDKVSLFTYDIYKNRRYMENKFLFHLSIVQNYKAANDSAQLNSSATEYIRKADDLHIIGIDRGERNLLYYSVIDMKGNIVEQDSLNIIRNNDLETDYHDLLDKREKERKANRQNWEAVEGIKDLKKGYLSQAVHQIAQLMLKYNAIIALEDLGQMFVTRGQKIEKAVYQQFEKSLVDKLSYLVDKKRPYNELGGILKAYQLASSITKNNSDKQNGFLFYVPAWNTSKIDPVTGFTDLLRPKAMTIKEAQDFFGAFDNISYNDKGYFEFETNYDKFKIRMKSAQTRWTICTFGNRIKRKKDKNYWNYEEVELTEEFKKLFKDSNIDYENCNLKEEIQNKDNRKFFDDLIKLLQLTLQMRNSDDKGNDYIISPVANAEGQFFDSRNGDKKLPLDADANGAYNIARKGLWNIRQIKQTKNDKKLNLSISSTEWLDFVREKPYLK

SEQ ID NO: 822 - protein, 1129 aa, Alicyclobacillus acidoterrestris
MAVKSIKVKLRLDDMPEIRAGLWKLHKEVNAGVRYYTEWLSLLRQENLYRRSPNGDGEQECDKTAEECKAELLERLRARQVENGHRGPAGSDDELLQLARQLYELLVPQAIGAKGDAQQIARKFLSPLADKDAVGGLGIAKAGNKPRWVRMREAGEPGWEEEKEKAETRKSADRTADVLRALADFGLKPLMRVYTDSEMSSVEWKPLRKGQAVRTWDRDMFQQAIERMMSWESWNQRVGQEYAKLVEQKNRFEQKNFVGQEHLVHLVNQLQQDMKEASPGLESKEQTAHYVTGRALRGSDKVFEKWGKLAPDAPFDLYDAEIKNVQRRNTRRFGSHDLFAKLAEPEYQALWREDASFLTRYAVYNSILRKLNHAKMFATFTLPDATAHPIWTRFDKLGGNLHQYTFLFNEFGERRHAIRFHKLLKVENGVAREVDDVTVPISMSEQLDNLLPRDPNEPIALYFRDYGAEQHFTGEFGGAKIQCRRDQLAHMHRRRGARDVYLNVSVRVQSQSEARGERRPPYAAVFRLVGDNHRAFVHFDKLSDYLAEHPDDGKLGSEGLLSGLRVMSVDLGLRTSASISVFRVARKDELKPNSKGRVPFFFPIKGNDNLVAVHERSQLLKLPGETESKDLRAIREERQRTLRQLRTQLAYLRLLVRCGSEDVGRRERSWAKLIEQPVDAANHMTPDWREAFENELQKLKSLHGICSDKEWMDAVYESVRRVWRHMGKQVRDWRKDVRSGERPKIRGYAKDVVGGNSIEQIEYLERQYKFLKSWSFFGKVSGQVIRAEKGSRFAITLREHIDHAKEDRLKKLADRIIMEALGYVYALDERGKGKWVAKYPPCQLILLEELSEYQFNNDRPPSENNQLMQWSHRGVFQELINQAQVHDLLVGTMYAAFSSRFDARTGAPGIRCRRVPARCTQEHNPEPFPWWLNKFVVEHTLDACPLRADDLIPTGEGEIFVSPFSAEEGDFHQIHADLNAAQNLQQRLWSDFDISQIRLRCDWGEVDGELVLIPRLTGKRTADSYSNKVFYTNTGVTYYERERGKKRRKVFAQEKLSEEEAELLVEADEAREKSVVLMRDPSGIINRGNWTRQKEFWSMVNQRIEGYLVKQIRSRVPLQDSACENTGDI

SEQ ID NO: 823 - protein, 872 aa, Alicyclobacillus contaminans
MGFNTAELLRKVEEEMRKTSVGFDTDNPFAHRITRRAIRGWDRIAEAWRRLPPDAPESEYIEAFKDIQRKNPRKIGSEPLFKNLAAPGVRSELLNNPQVLITFAKYNELQRQLAKAKQFAQKTLPHPVFHPVWVRYDKLGGNLHHYQIEPAVHANDTHKVKFSSLLLPQEDGSYAEVKDVTVSLAPSLQFPTGLVHPKVTTPPRTGLVTVMDEEAGKPVVCYRDRGHDALVPVAFGGAKLQFNRAHLSAGYRKGVLSAGGGGSIYFNVTLDVQVPNERDVSKTFSFSRDRDLVSLKAEELKRYMETKPLGMPGVRVMSVDLGVRYGAAISVFEVKPFAEVRKDKLHYPITGCEGFVAEHERSVILKLPGEGVRTAGKQSERKQALAAIRAEMSILRKWLRVSQVTEEDRAKAVRGLLEDERGGGWTMDPGEDSDHQPLQQFLHEARLAVGELVNLVHLSPAEWERAVIERHRRLERITASHIRVFQTMRKVWGKRRNEDAAHTGGISLAHIEHLIQQRKLFIRWSTHARTYGEVRRLPKHEGFAKRLQKHTNHVKEDRIKKLADMIVMAARGYRFLDKRARWVKTRHAPCDLILFEDLSRYRFTMDRPPTENSQLMNWSHRELLKTVKMQAALFGIGVGTVPAAFTSRFDAQTGAPGLRCKRVTKQDKEKTPFWLIQFAEITGVNVTNVEPGQLIPVDGGEWFVSPKGPRAADGLKCVHADINAAHNLQRRFWIPRLPSVKCRRYVEAEGFAAVPSSTAFMKVHGKGAFVSVDGEFYEYQKGRRVAVNRADRTSSTLDEDEGDIGEEMLVSSNGAGEFVRMFYDESGYVGYGRWMDSKVFWGKVRQIVHRAIQDQVEKRAAARGENGATSSR

SEQ ID NO: 824 - protein, 1149 aa, Desulfovibrio inopinatus
MPTRTINLKLVLGKNPENATLRRALFSTHRLVNQATKRIEEFLLLCRGEAYRTVDNEGKEAEIPRHAVQEEALAFAKAAQRHNGCISTYEDQEILDVLRQLYERLVPSVNENNEAGDAQAANAWVSPLMSAESEGGLSVYDKVLDPPPVWMKLKEEKAPGWEAASQIWIQSDEGQSLLNKPGSPPRWIRKLRSGQPWQDDFVSDQKKKQDELTKGNAPLIKQLKEMGLLPLVNPFFRHLLDPEGKGVSPWDRLAVRAAVAHFISWESWNHRTRAEYNSLKLRRDEFEAASDEFKDDFTLLRQYEAKRHSTLKSIALADDSNPYRIGVRSLRAWNRVREEWIDKGATEEQRVTILSKLQTQLRGKFGDPDLFNWLAQDRHVHLWSPRDSVTPLVRINAVDKVLRRRKPYALMTFAHPRFHPRWILYEAPGGSNLRQYALDCTENALHITLPLLVDDAHGTWIEKKIRVPLAPSGQIQDLTLEKLEKKKNRLYYRSGFQQFAGLAGGAEVLFHRPYMEHDERSEESLLERPGAVWFKLTLDVATQAPPNWLDGKGRVRTPPEVHHFKTALSNKSKHTRTLQPGLRVLSVDLGMRTFASCSVFELIEGKPETGRAFPVADERSMDSPNKLWAKHERSFKLTLPGETPSRKEEEERSIARAEIYALKRDIQRLKSLLRLGEEDNDNRRDALLEQFFKGWGEEDVVPGQAFPRSLFQGLGAAPFRSTPELWRQHCQTYYDKAEACLAKHISDWRKRTRPRPTSREMWYKTRSYHGGKSIWMLEYLDAVRKLLLSWSLRGRTYGAINRQDTARFGSLASRLLHHINSLKEDRIKTGADSIVQAARGYIPLPHGKGWEQRYEPCQLILFEDLARYRFRVDRPRRENSQLMQWNHRAIVAETTMQAELYGQIVENTAAGFSSRFHAATGAPGVRCRFLLERDFDNDLPKPYLLRELSWMLGNTKVESEEEKLRLLSEKIRPGSLVPWDGGEQFATLHPKRQTLCVIHADMNAAQNLQRRFFGRCGEAFRLVCQPHGDDVLRLASTPGARLLGALQQLENGQGAFELVRDMGSTSQMNRFVMKSLGKKKIKPLQDNNGDDELEDVLSVLPEEDDTGRITVFRDSSGIFFPCNVWIPAKQFWPAVRAMIWKVMASHSLG

SEQ ID NO: 825 - protein, 1194 aa, Desulfonatronum thiodismutans
MVLGRKDDTAELRRALWTTHEHVNLAVAEVERVLLRCRGRSYWTLDRRGDPVHVPESQVAEDALAMAREAQRRNGWPVVGEDEEILLALRYLYEQIVPSCLLDDLGKPLKGDAQKIGTNYAGPLFDSDTCRRDEGKDVACCGPFHEVAGKYLGALPEWATPISKQEFDGKDASHLRFKATGGDDAFFRVSIEKANAWYEDPANQDALKNKAYNKDDWKKEKDKGISSWAVKYIQKQLQLGQDPRTEVRRKLWLELGLLPLFIPVFDKTMVGNLWNRLAVRLALAHLLSWESWNHRAVQDQALARAKRDELAALFLGMEDGFAGLREYELRRNESIKQHAFEPVDRPYVVSGRALRSWTRVREEWLRHGDTQESRKNICNRLQDRLRGKFGDPDVFHWLAEDGQEALWKERDCVTSFSLLNDADGLLEKRKGYALMTFADARLHPRWAMYEAPGGSNLRTYQIRKTENGLWADVVLLSPRNESAAVEEKTFNVRLAPSGQLSNVSFDQIQKGSKMVGRCRYQSANQQFEGLLGGAEILFDRKRIANEQHGATDLASKPGHVWFKLTLDVRPQAPQGWLDGKGRPALPPEAKHFKTALSNKSKFADQVRPGLRVLSVDLGVRSFAACSVFELVRGGPDQGTYFPAADGRTVDDPEKLWAKHERSFKITLPGENPSRKEEIARRAAMEELRSLNGDIRRLKAILRLSVLQEDDPRTEHLRLFMEAIVDDPAKSALNAELFKGFGDDRFRSTPDLWKQHCHFFHDKAEKVVAERFSRWRTETRPKSSSWQDWRERRGYAGGKSYWAVTYLEAVRGLILRWNMRGRTYGEVNRQDKKQFGTVASALLHHINQLKEDRIKTGADMIIQAARGFVPRKNGAGWVQVHEPCRLILFEDLARYRFRTDRSRRENSRLMRWSHREIVNEVGMQGELYGLHVDTTEAGFSSRYLASSGAPGVRCRHLVEEDFHDGLPGMHLVGELDWLLPKDKDRTANEARRLLGGMVRPGMLVPWDGGELFATLNAASQLHVIHADINAAQNLQRRFWGRCGEAIRIVCNQLSVDGSTRYEMAKAPKARLLGALQQLKNGDAPFHLTSIPNSQKPENSYVMTPTNAGKKYRAGPGEKSSGEEDELALDIVEQAEELAQGRKTFFRDPSGVFFAPDRWLPSEIYWSRIRRRIWQVTLERNSSGRQERAEMDEMPY

SEQ ID NO: 826 - protein, 1132 aa, Tuberibacillus calidus
MATKSFILKMKTKNNPQLRLSLWKTHELFNFGVAYYMDLLSLFRQKDLYMHNDEDPDHPVVLKKEEIQERLWMKVRETQQKNGFHGEVSKDEVLETLRALYEELVPSAVGKSGEANQISNKYLYPLTDPASQSGKGTANSGRKPRWKKLKEAGDPSWKDAYEKWEKERQEDPKLKILAALQSFGLIPLFRPFTENDHKAVISVKWMPKSKNQSVRKFDKDMFNQAIERFLSWESWNEKVAEDYEKTVSIYESLQKELKGISTKAFEIMERVEKAYEAHLREITFSNSTYRIGNRAIRGWTEIVKKWMKLDPSAPQGNYLDVVKDYQRRHPRESGDFKLFELLSRPENQAAWREYPEFLPLYVKYRHAEQRMKTAKKQATFTLCDPIRHPLWVRYEERSGTNLNKYRLIMNEKEKVVQFDRLICLNADGHYEEQEDVTVPLAPSQQFDDQIKFSSEDTGKGKHNFSYYHKGINYELKGTLGGARIQFDREHLLRRQGVKAGNVGRIFLNVTLNIEPMQPFSRSGNLQTSVGKALKVYVDGYPKVVNFKPKELTEHIKESEKNTLTLGVESLPTGLRVMSVDLGQRQAAAISIFEVVSEKPDDNKLFYPVKDTDLFAVHRTSFNIKLPGEKRTERRMLEQQKRDQAIRDLSRKLKFLKNVLNMQKLEKTDEREKRVNRWIKDREREEENPVYVQEFEMISKVLYSPHSVWVDQLKSIHRKLEEQLGKEISKWRQSISQGRQGVYGISLKNIEDIEKTRRLLFRWSMRPENPGEVKQLQPGERFAIDQQNHLNHLKDDRIKKLANQIVMTALGYRYDGKRKKWIAKHPACQLVLFEDLSRYAFYDERSRLENRNLMRWSRREIPKQVAQIGGLYGLLVGEVGAQYSSRFHAKSGAPGIRCRVVKEHELYITEGGQKVRNQKFLDSLVENNIIEPDDARRLEPGDLIRDQGGDKFATLDERGELVITHADINAAQNLQKRFWTRTHGLYRIRCESREIKDAVVLVPSDKDQKEKMENLFGIGYLQPFKQENDVYKWVKGEKIKGKKTSSQSDDKELVSEILQEASVMADELKGNRKTLFRDPSGYVFPKDRWYTGGRYFGTLEHLLKRKLAERRLFDGGSSRRGLFNGTDSNTNVE

SEQ ID NO: 827 - protein, 1108 aa, Bacillus thermoamylovorans
MATRSFILKIEPNEEVKKGLWKTHEVLNHGIAYYMNILKLIRQEAIYEHHEQDPKNPKKVSKAEIQAELWDFVLKMQKCNSFTHEVDKDVVFNILRELYEELVPSSVEKKGEANQLSNKFLYPLVDPNSQSGKGTASSGRKPRWYNLKIAGDPSWEEEKKKWEEDKKKDPLAKILGKLAEYGLIPLFIPFTDSNEPIVKEIKWMEKSRNQSVRRLDKDMFIQALERFLSWESWNLKVKEEYEKVEKEHKTLEERIKEDIQAFKSLEQYEKERQEQLLRDTLNTNEYRLSKRGLRGWREIIQKWLKMDENEPSEKYLEVFKDYQRKHPREAGDYSVYEFLSKKENHFIWRNHPEYPYLYATFCEIDKKKKDAKQQATFTLADPINHPLWVRFEERSGSNLNKYRILTEQLHTEKLKKKLTVQLDRLIYPTESGGWEEKGKVDIVLLPSRQFYNQIFLDIEEKGKHAFTYKDESIKFPLKGTLGGARVQFDRDHLRRYPHKVESGNVGRIYFNMTVNIEPTESPVSKSLKIHRDDFPKFVNFKPKELTEWIKDSKGKKLKSGIESLEIGLRVMSIDLGQRQAAAASIFEVVDQKPDIEGKLFFPIKGTELYAVHRASFNIKLPGETLVKSREVLRKAREDNLKLMNQKLNFLRNVLHFQQFEDITEREKRVTKWISRQENSDVPLVYQDELIQIRELMYKPYKDWVAFLKQLHKRLEVEIGKEVKHWRKSLSDGRKGLYGISLKNIDEIDRTRKFLLRWSLRPTEPGEVRRLEPGQRFAIDQLNHLNALKEDRLKKMANTIIMHALGYCYDVRKKKWQAKNPACQIILFEDLSNYNPYEERSRFENSKLMKWSRREIPRQVALQGEIYGLQVGEVGAQFSSRFHAKTGSPGIRCSVVTKEKLQDNRFFKNLQREGRLTLDKIAVLKEGDLYPDKGGEKFISLSKDRKLVTTHADINAAQNLQKRFWTRTHGFYKVYCKAYQVDGQTVYIPESKDQKQKIIEEFGEGYFILKDGVYEWGNAGKLKIKKGSSKQSSSELVDSDILKDSFDLASELKGEKLMLYRDPSGNVFPSDKWMAAGVFFGKLERILISKLTNQYSISTIEDDSSKQSM

SEQ ID NO: 828 - protein, 1108 aa, unidentified
MAIRSIKLKLKTHTGPEAQNLRKGIWRTHRLLNEGVAYYMKMLLLFRQESTGERPKEELQEELICHIREQQQRNQADKNTQALPLDKALEALRQLYELLVPSSVGQSGDAQIISRKFLSPLVDPNSEGGKGTSKAGAKPTWQKKKEANDPTWEQDYEKWKKRREEDPTASVITTLEEYGIRPIFPLYTNTVTDIAWLPLQSNQFVRTWDRDMLQQAIERLLSWESWNKRVQEEYAKLKEKMAQLNEQLEGGQEWISLLEQYEENRERELRENMTAANDKYRITKRQMKGWNELYELWSTFPASASHEQYKEALKRVQQRLRGRFGDAHFFQYLMEEKNRLIWKGNPQRIHYFVARNELTKRLEEAKQSATMTLPNARKHPLWVRFDARGGNLQDYYLTAEADKPRSRRFVTFSQLIWPSESGWMEKKDVEVELALSRQFYQQVKLLKNDKGKQKIEFKDKGSGSTFNGHLGGAKLQLERGDLEKEEKNFEDGEIGSVYLNVVIDFEPLQEVKNGRVQAPYGQVLQLIRRPNEFPKVTTYKSEQLVEWIKASPQHSAGVESLASGFRVMSIDLGLRAAAATSIFSVEESSDKNAADFSYWIEGTPLVAVHQRSYMLRLPGEQVEKQVMEKRDERFQLHQRVKFQIRVLAQIMRMANKQYGDRWDELDSLKQAVEQKKSPLDQTDRTFWEGIVCDLTKVLPRNEADWEQAVVQIHRKAEEYVGKAVQAWRKRFAADERKGIAGLSMWNIEELEGLRKLLISWSRRTRNPQEVNRFERGHTSHQRLLTHIQNVKEDRLKQLSHAIVMTALGYVYDERKQEWCAEYPACQVILFENLSQYRSNLDRSTKENSTLMKWAHRSIPKYVHMQAEPYGIQIGDVRAEYSSRFYAKTGTPGIRCKKVRGQDLQGRRFENLQKRLVNEQFLTEEQVKQLRPGDIVPDDSGELFMTLTDGSGSKEVVFLQADINAAHNLQKRFWQRYNELFKVSCRVIVRDEEEYLVPKTKSVQAKLGKGLFVKKSDTAWKDVYVWDSQAKLKGKTTFTEESESPEQLEDFQEIIEEAEEAKGTYRTLFRDPSGVFFPESVWYPQKDFWGEVKRKLYGKLRERFLTKAR

SEQ ID NO: 829 - protein, 658 aa, Methylobacterium nodulans
MLTKQDKQQKITYCTNMNEVFEAKLGSADLLLNWDHLRGRIRDRVDAGDIGSAFLKLALDVAHVLPDGVDDQLARAAFHFQSAKGAKSKHADSVQAGLRVLSIDLGVRSFATCSVFELKDTAPTTGVAFPLAEFRLWAVHERSFTLELPGENVGAAGQQWRAQADAELRQLRGGLNRHRQLLRAATVQKGERDAYLTDLREAWSAKELWPFEASLLSELERCSTVADPLWQDTCKRAARLYRTEFGAVVSEWRSRTRSREDRKYAGKSMWSVQHLTDVRRFLQSWSLAGRASGDIRRLDRERGGVFAKDLLDHIDALKDDRLKTGADLIVQAARGFQRNEFGYWVQKHAPCHVILFEDLSRYRMRTDRPRRENSQLMQWAHRGVPDMVGMQGEIYGIQDRRDPDSARKHARQPLAAFCLDTPAAFSSRYHASTMTPGIRCHPLRKREFEDQGFLELLKRENEGLDLNGYKPGDLVPLPGGEVFVCLNANGLSRIHADINAAQNLQRRFWTQHGDAFRLPCGKSAVQGQIRWAPLSMGKRQAGALGGFGYLEPTGHDSGSCQWRKTTEAEWRRLSGAQKDRDEAAAAEDEELQGLEEELLERSGERVVFFRDPSGVVLPTDLWFPSAAFWSIVRAKTVGRLRSHLDAQAEASYAVAAGL

SEQ ID NO: 830 - protein, 1302 aa, unidentified
MKKFELKQNFRNNYSGKTLRNFRQTLAQIANKKSSDSILTIKFKLDCSKTGKLPKYENLISLYDTIEDIKKGTLSYYLFTLIVSGFKFFGSASQAKAFSTKDIFKDNDFYNQFKIQSHLDLPDFVPSKIYQRLKKNVRSTNGKDNAFKASVIVAEYRKEIGKLKNKDESSEHQCEELFKKIGTALETRFSSWQDLINNCSTGCEIIDEILNDSFGTLPSIKKMVLASTTQSSDGEQDGIAIAYDPDSTFIKSDELLNPYFAVATILKSMPPEIQQDKKSAYVKANLTTPTHNALSWIFGKGLTLFQTESTEKLCAMFNVSDKRVIEQVQDAAKAVKLPAELDLNHCTLKFQDFRSSLGGHLDSWTTNYLKRLDELNDLLLNLPKNLSLPDIFMIDGKDFIEYSGCNRDEIQQMIDFVVNEQNRIKLQESLNALLGKGNNQICSDDISTVKDFSEIVNSLHSFVQQIDNSLEQSSNEANSIFSELKKKIEKNEKWDIWKNNLKKIPKLNKLSGGVPDAWKEIREIEQKFHEISENQKKHFTEVMEWIDAGNGTIDIFESRFKYDELLKKSKKNNLQSADELAFRSVLNKLGRFARQGNDLVCEKIKNWFKEQNIFDSSKDFNRYFINQKGFIFKHPSSKKDNSPYNLSANLLEKRYEVTNTVGALLEQCESDPAIVNDPFSMRSLVEFRALWFSINISGISKEQHIPTKIAQPKLDDSTYQESVSPTLKYRLEKEQITSSELNSIFTVYKSLLSGLSIRLSRNSFYLRTKFSWIGNNSLIYCPKETTWKIPAAYFKSDLWNEYKDKQILIVNEEYDVDVVKTFESVYKIVKSKDNNEKNRILPLLKQLPHDWMFKLPFGASNAEKCKVLKLEKNNKKFKPLSVSKDSLARLSGPSTYFNQIDEIMMNDESELSEMTLLADEPVRQQMSNGKIEIIPDDYVMSLAIPITRSLKKGNTESFPFKNIVSIDQGEAGFAYAVFKLSDCGNERAEPIATGLIPIPSIRRLIHSVKKYRGKKQRIQNFNQKFDSTMFTLRENVTGDICGLIVALMKKYNAFPILEKQVGNLESGSKQLMLVYKAVNSKFLAAKVDMQNDQRRSWWYQGNSWNTPILRISNPNQSNNKNIVKNINGKKYEELKIYPGYSVSAYMTSCICHVCGRNALELLKNDDSTGKVKKYQINQDGEVTIGGEVIKLYRKPDRLTPVKNLAKKGNRERTYASINERAPTVSVQKAELSADELQKIIKKNMRRAPRSLMSKDTTQSRYFCVFKNCPCHNKEQHADVNAAINIGRRFLKDCILDDNKEKD

SEQ ID NO: 831 - protein, 1255 aa, unidentified
MRSNYHGGRNARQWRKQISGLARRTKETVFTYKFPLETDAAEIDFDKAVQTYGIAEGVGHGSLIGLVCAFHLSGFRLFSKAGEAMAFRNRSRYPTDAFAEKLSAIMGIQLPTLSPEGLDLIFQSPPRSRDGIAPVWSENEVRNRLYTNWTGRGPANKPDEHLLEIAGEIAKQVFPKFGGWDDLASDPDKALAAADKYFQSQGDFPSIASLPAAIMLSPANSTVDFEGDYIAIDPAAETLLHQAVSRCAARLGRERPDLDQNKGPFVSSLQDALVSSQNNGLSWLFGVGFQHWKEKSPKELIDEYKVPADQHGAVTQVKSFVDAIPLNPLFDTTHYGEFRASVAGKVRSWVANYWKRLLDLKSLLATTEFTLPESISDPKAVSLFSGLLVDPQGLKKVADSLPARLVSAEEAIDRLMGVGIPTAADIAQVERVADEIGAFIGQVQQFNNQVKQKLENLQDADDEEFLKGLKIELPSGDKEPPAINRISGGAPDAAAEISELEEKLQRLLDARSEHFQTISEWAEENAVTLDPIAAMVELERLRLAERGATGDPEEYALRLLLQRIGRLANRVSPVSAGSIRELLKPVFMEEREFNLFFHNRLGSLYRSPYSTSRHQPFSIDVGKAKAIDWIAGLDQISSDIEKALSGAGEALGDQLRDWINLAGFAISQRLRGLPDTVPNALAQVRCPDDVRIPPLLAMLLEEDDIARDVCLKAFNLYVSAINGCLFGALREGFIVRTRFQRIGTDQIHYVPKDKAWEYPDRLNTAKGPINAAVSSDWIEKDGAVIKPVETVRNLSSTGFAGAGVSEYLVQAPHDWYTPLDLRDVAHLVTGLPVEKNITKLKRLTNRTAFRMVGASSFKTHLDSVLLSDKIKLGDFTIIIDQHYRQSVTYGGKVKISYEPERLQVEAAVPVVDTRDRTVPEPDTLFDHIVAIDLGERSVGFAVFDIKSCLRTGEVKPIHDNNGNPVVGTVAVPSIRRLMKAVRSHRRRRQPNQKVNQTYSTALQNYRENVIGDVCNRIDTLMERYNAFPVLEFQIKNFQAGAKQLEIVYGSVLHRYTFSGVDAHKAKRREYWYNGELWEHPYLMAKKWNEETNSMSGAPKPVSLFPGVTVNAARTSQICHQCQRNPMSHLRGLTGTIEISSDGLLELDDGTIRLFETSDYDEDKFKQSRREKRRLDANVLLSGRHRAEYIYTVAKRNLRRPPKNVMTKDTTQSRYTCLYKNCSWTGHADENAAINIGRRYLAERIDMPASKTKAAV

SEQ ID NO: 832 - protein, 1266 aa, unidentified
MRPRFHGGMNARDWRKHVGVLAQQHKETTRTYTFPLDTTGSAIDFDAALQAYNAVEGVGYGSLLGLACAVHLSGFRLFSTGKEAATFRNRARYPNAAFQAALRKELGTTITTLTPETLDRLFSSRPKRRNGVPLPWNQDSIRDRLYTNWVKPRPGDTPDAVLFQIATGIAQEITEDVSSWTDLAKNSDRGLKAAHRYFARVGGFPAFDNLTPPATVQPTDTTIDYDPNAPFHLVSHADQTLIHQSISLCAHRIRQEDPALDPNKSGFIKQLQNNFLSQTFYGLSWLFGAGYVHFRECTANDLAIQYGIPNNCRDGIHQIKSFADAILPNTFFEKKHYRKDSRSVGKKAKSWISNYWQRLLQLQTWVDDHTWVTLPQELTEAQFKPLFRGLLVDAVELMAIAERLPQRLADCRDSLDCLMGKGPQAATKNDVEIVEKVREEIESFVGQIEQLGNQLRHQLENENNDQVHRDNLHQLKNRLPLDLRRPQALNKISGGVPDVAKSIRGLETQLDQVLKERRSHFGRLTKWAKECGITLDPLQPLIESEKQRVAERGSAHDAKELAIRLLLQRIGRLGHRLSPTNATAIQELLRPVFAVKREFNLFFHNHMGALYRSPYSTSRHQPFQINVDVAHGTDWIGTIETLIQNLFTQIQDDALLRDLVQLEGFVFSHKLRALPGVIPSELARPNNLQQMGLPALLLVLLQADQVHRETVLRVFNLYGSAINGYLFQALRPGFIVRAGFQRLETKKLRYVPKAQSWQYPDRLHHAKSAIKNSLSAGWIKKNHQGAILPQKTLTALVKQKSLKDTGVPEYLVQAPHDWYVPIDLRGPAIPIEGLTVGTEGPELTQLGPMKDDCAFRAIGPSSFKSKIDAGLLPQDVKYGDMTLIFDQHYQQSISFANGTFSIQYQPTSLQVKAAIPVVDKRPRDTRNNSHLYDRIVAIDLGERKIGYAIFDLKQVLKSEQLEPMREDGKPLIGSISIRSIRGLMKAVQTHRNRRQPNYRIDQTYSKALMHYRESVIGDVCNAIDTLCARYGGFPVLESSVRNFEVGSAQLKTVYGSVSRRYTWSAVDAHKNQRQQYWLGGTKDKIPIWTHPYLMTREWDEKNSKWSNRSKPLKMHPGVEVHPAGTSQICHQCKRNPIGALWNVADTVVLDDQGQLDLDDGTIRLNSGYIDTTEIKRARRKKIRLPENKPLTGSHKTSHVRAVARRNLRQPPKSTRAKDTTQSRYTCLYVDCGHECHADENAAINIGRKYLQERIHIEASRQALSTR

SEQ ID NO: 833 - protein, 1269 aa, unidentified
MVAGLKKIKRDGVTMKSNYHGGVKARAWRKRIGGLARRQKETVFTYKFPLETEEAGIDFDKAVQTYGIAEGISQGSLIGLVCAFHLSGFRLFSKADETKAFCNQGRYPNQAFAEKLRNELSVTLPKLSPQSLDVLFQSSPKSKNGVAPEWSKNAIRNRLYTNWTGKGAGTNPDEHLLEIAEDIAAEIDSDLDGWKDLEEHPEKGLSAADRYFQAQGDFPSLTGLPPSVPLTPQNSTVAFEGDPVCLNPSDNTLLHQAVARCAGRILQEQPNLSPDKNRFINQLQDELVSSQNNGLSWLFGVGFKYWKEMSVDQLADDYKVKSTDLDALKQVKSFIDAIPLNPLFDTPHYGEFRASVAGKMRSWVKNYWKRLLDLKSQLGTANINLPEGLDEQRAENLFSGLLIDSKGLRQVTDKLPSRLKKAEDTIDRLMGDGNPTSDDIEQVETVAAEISAFIGQVEQFNNQLEQRLENPLEGDDETFLKQLKIDLPAEFKKPPAINRISGGSPDPTAEIAELEEKLDRLMSARKEHYETIAEWASANKVTLDPMEAMTTLEAQRLTERGAEGDQEEFALRLLLQRIGRLANRLSPQGATAIRDLLRPVFTEKREFNLFFHNRMGSLYRSPYSTSRHQPFTIDVAVAKNTDWMDALDGIAETIMKGLSQAGDELSLRLRDWINISGFSLSQRLRGLPDTVPGELALVRSADDVRIPPMLALQLEEDEVSREVCLKAFNLYVSAINGCLFRALREGFIVRTKFQRLERDVLSYVPKTKLWNYPQRLDTARGPIHSALAAAWINKEGSVIDPVETVTALSDTGFSDDGIPEYLVQAPHDWYTPIDLRDISKPVSGLPVKKNITGLKRQKKQTAFRMVGPSSFKSHLDSTLLSEEVKLGDFTLIFDQYYKQRVSYNGRVKITFEPDRLHVEAAVPVIDKRVRPSTEEDALFDHLLAIDLGEKRVGYAVYDIKACLRTGDIKPLEDGDGKPIVGSVAVPSIRRLMKAVRSHRQQRQPNQKVNQTYSTALMNYRENVIGDVCNRIDTLMEKYNAFPVLESSVMNFEAGSRQLEMVYGSVLHRYTYSKIDAHTAKRKEYWYTGEYWDHPYLMAHKWNERTRSYSGSLSALTLYPGVMVHPAGTSQRCHQCKRNPMVEIKQLTGQVEINADGSLELDDGTICLYEGYDYSPEEYKKAKREKRRLDPNVPLSGRHQAKHVSAVAKRNLRRPTVSMMSGDTTQARYVCLYTDCDFTGHADENAAINIGWKYLTERIALSESKDKAGV

SEQ ID NO: 834 - protein, 1340 aa, unidentified
MQISKVNHKHVAVGQKDRERITGFIYNDPVGDEKSLEDVVAKRANDTKVLFNVFNTKDLYDSQESDKSEKDKEIISKGAKFVAKSFNSAITILKKQNKIYSTLTSQQVIKELKDKFGGARIYDDDIEEALTETLKKSFRKENVRNSIKVLIENAAGIRSSLSKDEEELIQEYFVKQLVEEYTKTKLQKNVVKSIKNQNMVIQPDSDSQVLSLSESRREKQSSAVSSDTLVNCKEKDVLKAFLTDYAVLDEDERNSLLWKLRNLVNLYFYGSESIRDYSYTKEKSVWKEHDEQKANKTLFIDEICHITKIGKNGKEQKVLDYEENRSRCRKQNINYYRSALNYAKNNTSGIFENEDSNHFWIHLIENEVERLYNGIENGEEFKFETGYISEKVWKAVINHLSIKYIALGKAVYNYAMKELSSPGDIEPGKIDDSYINGITSFDYEIIKAEESLQRDISMNVVFATNYLACATVDTDKDFLLFSKEDIRSCTKKDGNLCKNIMQFWGGYSTWKNFCEEYLKDDKDALELLYSLKSMLYSMRNSSFHFSTENVDNGSWDTELIGKLFEEDCNRAARIEKEKFYNNNLHMFYSSSLLEKVLERLYSSHHERASQVPSFNRVFVRKNFPSSLSEQRITPKFTDSKDEQIWQSAVYYLCKEIYYNDFLQSKEAYKLFREGVKNLDKNDINNQKAADSFKQAVVYYGKAIGNATLSQVCQAIMTEYNRQNNDGLKKKSAYAEKQNSNKYKHYPLFLKQVLQSAFWEYLDENKEIYGFISAQIHKSNVEIKAEDFIANYSSQQYKKLVDKVKKTPELQKWYTLGRLINPRQANQFLGSIRNYVQFVKDIQRRAKENGNPIRNYYEVLESDSIIKILEMCTKLNGTTSNDIHDYFRDEDEYAEYISQFVNFGDVHSGAALNAFCNSESEGKKNGIYYDGINPIVNRNWVLCKLYGSPDLISKIISRVNENMIHDFHKQEDLIREYQIKGICSNKKEQQDLRTFQVLKNRVELRDIVEYSEIINELYGQLIKWCYLRERDLMYFQLGFHYLCLNNASSKEADYIKINVDDRNISGAILYQIAAMYINGLPVYYKKDDMYVALKSGKKASDELNSNEQTSKKINYFLKYGNNILGDKKDQLYLAGLELFENVAEHENIIIFRNEIDHFHYFYDRDRSMLDLYSEVFDRFFTYDMKLRKNVVNMLYNILLDHNIVSSFVFETGEKKVGRGDSEVIKPSAKIRLRANNGVSSDVFTYKVGSKDELKIATLPAKNEEFLLNVARLIYYPDMEAVSENMVREGVVKVEKSNDKKGKISRGSNTRSSNQSKYNNKSKNRMNYSMGSIFEKMDLKFD

SEQ ID NO: 835 - protein, 1437 aa, unidentified
MKISKVREENRGAKLTVNAKTAVVSENRSQEGILYNDPSRYGKSRKNDEDRDRYIESRLKSSGKLYRIFNEDKNKRETDELQWFLSEIVKKINRRNGLVLSDMLSVDDRAFEKAFEKYAELSYTNRRNKVSGSPAFETCGVDAATAERLKGIISETNFINRIKNNIDNKVSEDIIDRIIAKYLKKSLCRERVKRGLKKLLMNAFDLPYSDPDIDVQRDFIDYVLEDFYHVRAKSQVSRSIKNMNMPVQPEGDGKFAITVSKGGTESGNKRSAEKEAFKKFLSDYASLDERVRDDMLRRMRRLVVLYFYGSDDSKLSDVNEKFDVWEDHAARRVDNREFIKLPLENKLANGKTDKDAERIRKNTVKELYRNQNIGCYRQAVKAVEEDNNGRYFDDKMLNMFFIHRIEYGVEKIYANLKQVTEFKARTGYLSEKIWKDLINYISIKYIAMGKAVYNYAMDELNASDKKEIELGKISEEYLSGISSFDYELIKAEEMLQRETAVYVAFAARHLSSQTVELDSENSDFLLLKPKGTMDKNDKNKLASNNILNFLKDKETLRDTILQYFGGHSLWTDFPFDKYLAGGKDDVDFLTDLKDVIYSMRNDSFHYATENHNNGKWNKELISAMFEHETERMTVVMKDKFYSNNLPMFYKNDDLKKLLIDLYKDNVERASQVPSFNKVFVRKNFPALVRDKDNLGIELDLKADADKGENELKFYNALYYMFKEIYYNAFLNDKNVRERFITKATKVADNYDRNKERNLKDRIKSAGSDEKKKLREQLQNYIAENDFGQRIKNIVQVNPDYTLAQICQLIMTEYNQQNNGCMQKKSAARKDINKDSYQHYKMLLLVNLRKAFLEFIKENYAFVLKPYKHDLCDKADFVPDFAKYVKPYAGLISRVAGSSELQKWYIVSRFLSPAQANHMLGFLHSYKQYVWDIYRRASETGTEINHSIAEDKIAGVDITDVDAVIDLSVKLCGTISSEISDYFKDDEVYAEYISSYLDFEYDGGNYKDSLNRFCNSDAVNDQKVALYYDGEHPKLNRNIILSKLYGERRFLEKITDRVSRSDIVEYYKLKKETSQYQTKGIFDSEDEQKNIKKFQEMKNIVEFRDLMDYSEIADELQGQLINWIYLRERDLMNFQLGYHYACLNNDSNKQATYVTLDYQGKKNRKINGAILYQICAMYINGLPLYYVDKDSSEWTVSDGKESTGAKIGEFYRYAKSFENTSDCYASGLEIFENISEHDNITELRNYIEHFRYYSSFDRSFLGIYSEVFDRFFTYDLKYRKNVPTILYNILLQHFVNVRFEFVSGKKMIGIDKKDRKIAKEKECARITIREKNGVYSEQFTYKLKNGTVYVDARDKRYLQSIIRLLFYPEKVNMDEMIEVKEKKKPSDNNTGKGYSKRDRQQDRKEYDKYKEKKKKEGNFLSGMGGNINWDEINAQLKN

SEQ ID NO: 836 - protein, 1385 aa, Clostridium aminophilum
MKFSKVDHTRSAVGIQKATDSVHGMLYTDPKKQEVNDLDKRFDQLNVKAKRLYNVFNQSKAEEDDDEKRFGKVVKKLNRELKDLLFHREVSRYNSIGNAKYNYYGIKSNPEEIVSNLGMVESLKGERDPQKVISKLLLYYLRKGLKPGTDGLRMILEASCGLRKLSGDEKELKVFLQTLDEDFEKKTFKKNLIRSIENQNMAVQPSNEGDPIIGITQGRFNSQKNEEKSAIERMMSMYADLNEDHREDVLRKLRRLNVLYFNVDTEKTEEPTLPGEVDTNPVFEVWHDHEKGKENDRQFATFAKILTEDRETRKKEKLAVKEALNDLKSAIRDHNIMAYRCSIKVTEQDKDGLFFEDQRINRFWIHHIESAVERILASINPEKLYKLRIGYLGEKVWKDLLNYLSIKYIAVGKAVFHFAMEDLGKTGQDIELGKLSNSVSGGLTSFDYEQIRADETLQRQLSVEVAFAANNLFRAVVGQTGKKIEQSKSEENEEDFLLWKAEKIAESIKKEGEGNTLKSILQFFGGASSWDLNHFCAAYGNESSALGYETKFADDLRKAIYSLRNETFHFTTLNKGSFDWNAKLIGDMFSHEAATGIAVERTRFYSNNLPMFYRESDLKRIMDHLYNTYHPRASQVPSFNSVFVRKNFRLFLSNTLNTNTSFDTEVYQKWESGVYYLFKEIYYNSFLPSGDAHHLFFEGLRRIRKEADNLPIVGKEAKKRNAVQDFGRRCDELKNLSLSAICQMIMTEYNEQNNGNRKVKSTREDKRKPDIFQHYKMLLLRTLQEAFAIYIRREEFKFIFDLPKTLYVMKPVEEFLPNWKSGMFDSLVERVKQSPDLQRWYVLCKFLNGRLLNQLSGVIRSYIQFAGDIQRRAKANHNRLYMDNTQRVEYYSNVLEVVDFCIKGTSRFSNVFSDYFRDEDAYADYLDNYLQFKDEKIAEVSSFAALKTFCNEEEVKAGIYMDGENPVMQRNIVMAKLFGPDEVLKNVVPKVTREEIEEYYQLEKQIAPYRQNGYCKSEEDQKKLLRFQRIKNRVEFQTITEFSEIINELLGQLISWSFLRERDLLYFQLGFHYLCLHNDTEKPAEYKEISREDGTVIRNAILHQVAAMYVGGLPVYTLADKKLAAFEKGEADCKLSISKDTAGAGKKIKDFFRYSKYVLIKDRMLTDQNQKYTIYLAGLELFENTDEHDNITDVRKYVDHFKYYATSDENAMSILDLYSEIHDRFFTYDMKYQKNVANMLENILLRHFVLIRPEFFTGSKKVGEGKKITCKARAQIEIAENGMRSEDFTYKLSDGKKNISTCMIAARDQKYLNTVARLLYYPHEAKKSIVDTREKKNNKKTNRGDGTFNKQKGTARKEKDNGPREFNDTGFSNTPFAGFDPFRNS

SEQ ID NO: 837 - protein, 1334 aa, unidentified
MKISKVDHTRMAVAKGNQHRRDEISGILYKDPTKTGSIDFDERFKKLNCSAKILYHVFNGIAEGSNKYKNIVDKVNNNLDRVLFTGKSYDRKSIIDIDTVLRNVEKINAFDRISTEEREQIIDDLLEIQLRKGLRKGKAGLREVLLIGAGVIVRTDKKQEIADFLEILDEDFNKTNQAKNIKLSIENQGLVVSPVSRGEERIFDVSGAQKGKSSKKAQEKEALSAFLLDYADLDKNVRFEYLRKIRRLINLYFYVKNDDVMSLTEIPAEVNLEKDFDIWRDHEQRKEENGDFVGCPDILLADRDVKKSNSKQVKIAERQLRESIREKNIKRYRFSIKTIEKDDGTYFFANKQISVFWIHRIENAVERILGSINDKKLYRLRLGYLGEKVWKDILNFLSIKYIAVGKAVFNFAMDDLQEKDRDIEPGKISENAVNGLTSFDYEQIKADEMLQREVAVNVAFAANNLARVTVDIPQNGEKEDILLWNKSDIKKYKKNSKKGILKSILQFFGGASTWNMKMFEIAYHDQPGDYEENYLYDIIQIIYSLRNKSFHFKTYDHGDKNWNRELIGKMIEHDAERVISVEREKFHSNNLPMFYKDADLKKILDLLYSDYAGRASQVPAFNTVLVRKNFPEFLRKDMGYKVHFNNPEVENQWHSAVYYLYKEIYYNLFLRDKEVKNLFYTSLKNIRSEVSDKKQKLASDDFASRCEEIEDRSLPEICQIIMTEYNAQNFGNRKVKSQRVIEKNKDIFRHYKMLLIKTLAGAFSLYLKQERFAFIGKATPIPYETTDVKNFLPEWKSGMYASFVEEIKNNLDLQEWYIVGRFLNGRMLNQLAGSLRSYIQYAEDIERRAAENRNKLFSKPDEKIEACKKAVRVLDLCIKISTRISAEFTDYFDSEDDYADYLEKYLKYQDDAIKELSGSSYAALDHFCNKDDLKFDIYVNAGQKPILQRNIVMAKLFGPDNILSEVMEKVTESAIREYYDYLKKVSGYRVRGKCSTEKEQEDLLKFQRLKNAVEFRDVTEYAEVINELLGQLISWSYLRERDLLYFQLGFHYMCLKNKSFKPAEYVDIRRNNGTIIHNAILYQIVSMYINGLDFYSCDKEGKTLKPIETGKGVGSKIGQFIKYSQYLYNDPSYKLEIYNAGLEVFENIDEHDNITDLRKYVDHFKYYAYGNKMSLLDLYSEFFDRFFTYDMKYQKNVVNVLENILLRHFVIFYPKFGSGKKDVGIRDCKKERAQIEISEQSLTSEDFMFKLDDKAGEEAKKFPARDERYLQTIAKLLYYPNEIEDMNRFMKKGETINKKVQFNRKKKITRKQKNNSSNEVLSSTMGYLFKNIKL

SEQ ID NO: 838 - protein, 1175 aa, Carnobacterium gallinarum
MRITKVKIKLDNKLYQVTMQKEEKYGTLKLNEESRKSTAEILRLKKASFNKSFHSKTINSQKENKNATIKKNGDYISQIFEKLVGVDTNKNIRKPKMSLTDLKDLPKKDLALFIKRKFKNDDIVEIKNLDLISLFYNALQKVPGEHFTDESWADFCQEMMPYREYKNKFIERKIILLANSIEQNKGFSINPETFSKRKRVLHQWAIEVQERGDFSILDEKLSKLAEIYNFKKMCKRVQDELNDLEKSMKKGKNPEKEKEAYKKQKNFKIKTIWKDYPYKTHIGLIEKIKENEELNQFNIEIGKYFEHYFPIKKERCTEDEPYYLNSETIATTVNYQLKNALISYLMQIGKYKQFGLENQVLDSKKLQEIGIYEGFQTKFMDACVFATSSLKNIIEPMRSGDILGKREFKEAIATSSFVNYHHFFPYFPFELKGMKDRESELIPFGEQTEAKQMQNIWALRGSVQQIRNEIFHSFDKNQKFNLPQLDKSNFEFDASENSTGKSQSYIETDYKFLFEAEKNQLEQFFIERIKSSGALEYYPLKSLEKLFAKKEMKFSLGSQVVAFAPSYKKLVKKGHSYQTATEGTANYLGLSYYNRYELKEESFQAQYYLLKLIYQYVFLPNFSQGNSPAFRETVKAILRINKDEARKKMKKNKKFLRKYAFEQVREMEFKETPDQYMSYLQSEMREEKVRKAEKNDKGFEKNITMNFEKLLMQIFVKGFDVFLTTFAGKELLLSSEEKVIKETEISLSKKINEREKTLKASIQVEHQLVATNSAISYWLFCKLLDSRHLNELRNEMIKFKQSRIKFNHTQHAELIQNLLPIVELTILSNDYDEKNDSQNVDVSAYFEDKSLYETAPYVQTDDRTRVSFRPILKLEKYHTKSLIEALLKDNPQFRVAATDIQEWMHKREEIGELVEKRKNLHTEWAEGQQTLGAEKREEYRDYCKKIDRFNWKANKVTLTYLSQLHYLITDLLGRMVGFSALFERDLVYFSRSFSELGGETYHISDYKNLSGVLRLNAEVKPIKIKNIKVIDNEENPYKGNEPEVKPFLDRLHAYLENVIGIKAVHGKIRNQTAHLSVLQLELSMIESMNNLRDLMAYDRKLKNAVTKSMIKILDKHGMILKLKIDENHKNFEIESLIPKEIIHLKDKAIKTNQVSEEYCQLVLALLTTNPGNQLN

SEQ ID NO: 839 - protein, 1154 aa, Paludibacter propionicigenes
MRVSKVKVKDGGKDKMVLVHRKTTGAQLVYSGQPVSNETSNILPEKKRQSFDLSTLNKTIIKFDTAKKQKLNVDQYKIVEKIFKYPKQELPKQIKAEEILPFLNHKFQEPVKYWKNGKEESFNLTLLIVEAVQAQDKRKLQPYYDWKTWYIQTKSDLLKKSIENNRIDLTENLSKRKKALLAWETEFTASGSIDLTHYHKVYMTDVLCKMLQDVKPLTDDKGKINTNAYHRGLKKALQNHQPAIFGTREVPNEANRADNQLSIYHLEVVKYLEHYFPIKTSKRRNTADDIAHYLKAQTLKTTIEKQLVNAIRANIIQQGKTNHHELKADTTSNDLIRIKTNEAFVLNLTGTCAFAANNIRNMVDNEQTNDILGKGDFIKSLLKDNTNSQLYSFFFGEGLSTNKAEKETQLWGIRGAVQQIRNNVNHYKKDALKTVFNISNFENPTITDPKQQTNYADTIYKARFINELEKIPEAFAQQLKTGGAVSYYTIENLKSLLTTFQFSLCRSTIPFAPGFKKVFNGGINYQNAKQDESFYELMLEQYLRKENFAEESYNARYFMLKLIYNNLFLPGFTTDRKAFADSVGFVQMQNKKQAEKVNPRKKEAYAFEAVRPMTAADSIADYMAYVQSELMQEQNKKEEKVAEETRINFEKFVLQVFIKGFDSFLRAKEFDFVQMPQPQLTATASNQQKADKLNQLEASITADCKLTPQYAKADDATHIAFYVFCKLLDAAHLSNLRNELIKFRESVNEFKFHHLLEIIEICLLSADVVPTDYRDLYSSEADCLARLRPFIEQGADITNWSDLFVQSDKHSPVIHANIELSVKYGTTKLLEQIINKDTQFKTTEANFTAWNTAQKSIEQLIKQREDHHEQWVKAKNADDKEKQERKREKSNFAQKFIEKHGDDYLDICDYINTYNWLDNKMHFVHLNRLHGLTIELLGRMAGFVALFDRDFQFFDEQQIADEFKLHGFVNLHSIDKKLNEVPTKKIKEIYDIRNKIIQINGNKINESVRANLIQFISSKRNYYNNAFLHVSNDEIKEKQMYDIRNHIAHFNYLTKDAADFSLIDLINELRELLHYDRKLKNAVSKAFIDLFDKHGMILKLKLNADHKLKVESLEPKKIYHLGSSAKDKPEYQYCTNQVMMAYCNMCRSLLEMKK

SEQ ID NO: 840 - protein, 1120 aa, Listeria seeligeri
MWISIKTLIHHLGVLFFCDYMYNRREKKIIEVKTMRITKVEVDRKKVLISRDKNGGKLVYENEMQDNTEQIMHHKKSSFYKSVVNKTICRPEQKQMKKLVHGLLQENSQEKIKVSDVTKLNISNFLNHRFKKSLYYFPENSPDKSEEYRIEINLSQLLEDSLKKQQGTFICWESFSKDMELYINWAENYISSKTKLIKKSIRNNRIQSTESRSGQLMDRYMKDILNKNKPFDIQSVSEKYQLEKLTSALKATFKEAKKNDKEINYKLKSTLQNHERQIIEELKENSELNQFNIEIRKHLETYFPIKKTNRKVGDIRNLEIGEIQKIVNHRLKNKIVQRILQEGKLASYEIESTVNSNSLQKIKIEEAFALKFINACLFASNNLRNMVYPVCKKDILMIGEFKNSFKEIKHKKFIRQWSQFFSQEITVDDIELASWGLRGAIAPIRNEIIHLKKHSWKKFFNNPTFKVKKSKIINGKTKDVTSEFLYKETLFKDYFYSELDSVPELIINKMESSKILDYYSSDQLNQVFTIPNFELSLLTSAVPFAPSFKRVYLKGFDYQNQDEAQPDYNLKLNIYNEKAFNSEAFQAQYSLFKMVYYQVFLPQFTTNNDLFKSSVDFILTLNKERKGYAKAFQDIRKMNKDEKPSEYMSYIQSQLMLYQKKQEEKEKINHFEKFINQVFIKGFNSFIEKNRLTYICHPTKNTVPENDNIEIPFHTDMDDSNIAFWLMCKLLDAKQLSELRNEMIKFSCSLQSTEEISTFTKAREVIGLALLNGEKGCNDWKELFDDKEAWKKNMSLYVSEELLQSLPYTQEDGQTPVINRSIDLVKKYGTETILEKLFSSSDDYKVSAKDIAKLHEYDVTEKIAQQESLHKQWIEKPGLARDSAWTKKYQNVINDISNYQWAKTKVELTQVRHLHQLTIDLLSRLAGYMSIADRDFQFSSNYILERENSEYRVTSWILLSENKNKNKYNDYELYNLKNASIKVSSKNDPQLKVDLKQLRLTLEYLELFDNRLKEKRNNISHFNYLNGQLGNSILELFDDARDVLSYDRKLKNAVSKSLKEILSSHGMEVTFKPLYQTNHHLKIDKLQPKKIHHLGEKSTVSSNQVSNEYCQLVRTLLTMK

SEQ ID NO: 841 - protein, 1051 aa, Listeria newyorkensis
MKITKMRVDGRTIVMERTSKEGQLGYEGIDGNKTTEIIFDKKKESFYKSILNKTVRKPDEKEKNRRKQAINKAINKEITELMLAVLHQEVPSQKLHNLKSLNTESLTKLFKPKFQNMISYPPSKGAEHVQFCLTDIAVPAIRDLDEIKPDWGIFFEKLKPYTDWAESYIHYKQTTIQKSIEQNKIQSPDSPRKLVLQKYVTAFLNGEPLGLDLVAKKYKLADLAESFKLVDLNEDKSANYKIKACLQQHQRNILDELKEDPELNQYGIEVKKYIQRYFPIKRAPNRSKHARADFLKKELIESTVEQQFKNAVYHYVLEQGKMEAYELTDPKTKDLQDIRSGEAFSFKFINACAFASNNLKMILNPECEKDILGKGNFKKNLPNSTTRSDVVKKMIPFFSDELQNVNFDEAIWAIRGSIQQIRNEVYHCKKHSWKSILKIKGFEFEPNNMKYADSDMQKLMDKDIAKIPEFIEEKLKSSGVVRFYRHDELQSIWEMKQGFSLLTTNAPFVPSFKRVYAKGHDYQTSKNRYYNLDLTTFDILEYGEEDFRARYFLTKLVYYQQFMPWFTADNNAFRDAANFVLRLNKNRQQDAKAFINIREVEEGEMPRDYMGYVQGQIAIHEDSIEDTPNHFEKFISQVFIKGFDRHMRSANLKFIKNPRNQGLEQSEIEEMSFDIKVEPSFLKNKDDYIAFWIFCKMLDARHLSELRNEMIKYDGHLTGEQEIIGLALLGVDSRENDWKQFFSSEREYEKIMKGYVVEELYQREPYRQSDGKTPILFRGVEQARKYGTETVIQRLFDANPEFKVSKCNLAEWERQKETIEETIKRRKELHNEWAKNPKKPQNNAFFKEYKECCDAIDAYNWHKNKTTLAYVNELHHLLIEILGRYVGYVAIADRDFQCMANQYFKHSGITERVEYWGDNRLKSIKKLDTFLKKEGLFVSEKNARNHIAHLNYLSLKSECTLLYLSERLREIFKYDRKLKNAVSKSLIDILDRHGMSVVFANLKENKHRLVIKSLEPKKLRHLGGKKIDGGYIETNQVSEEYCGIVKRLLEM

SEQ ID NO: 842 - protein, 1182 aa, Leptotrichia wadei
MYMKITKIDGVSHYKKQDKGILKKKWKDLDERKQREKIEARYNKQIESKIYKEFFRLKNKKRIEKEEDQNIKSLYFFIKELYLNEKNEEWELKNINLEILDDKERVIKGYKFKEDVYFFKEGYKEYYLRILFNNLIEKVQNENREKVRKNKEFLDLKEIFKKYKNRKIDLLLKSINNNKINLEYKKENVNEEIYGINPTNDREMTFYELLKEIIEKKDEQKSILEEKLDNFDITNFLENIEKIFNEETEINIIKGKVLNELREYIKEKEENNSDNKLKQIYNLELKKYIENNFSYKKQKSKSKNGKNDYLYLNFLKKIMFIEEVDEKKEINKEKFKNKINSNFKNLFVQHILDYGKLLYYKENDEYIKNTGQLETKDLEYIKTKETLIRKMAVLVSFAANSYYNLFGRVSGDILGTEVVKSSKTNVIKVGSHIFKEKMLNYFFDFEIFDANKIVEILESISYSIYNVRNGVGHFNKLILGKYKKKDINTNKRIEEDLNNNEEIKGYFIKKRGEIERKVKEKFLSNNLQYYYSKEKIENYFEVYEFEILKRKIPFAPNFKRIIKKGEDLFNNKNNKKYEYFKNFDKNSAEEKKEFLKTRNFLLKELYYNNFYKEFLSKKEEFEKIVLEVKEEKKSRGNINNKKSGVSFQSIDDYDTKINISDYIASIHKKEMERVEKYNEEKQKDTAKYIRDFVEEIFLTGFINYLEKDKRLHFLKEEFSILCNNNNNVVDFNININEEKIKEFLKENDSKTLNLYLFFNMIDSKRISEFRNELVKYKQFTKKRLDEEKEFLGIKIELYETLIEFVILTREKLDTKKSEEIDAWLVDKLYVKDSNEYKEYEEILKLFVDEKILSSKEAPYYATDNKTPILLSNFEKTRKYGTQSFLSEIQSNYKYSKVEKENIEDYNKKEEIEQKKKSNIEKLQDLKVELHKKWEQNKITEKEIEKYNNTTRKINEYNYLKNKEELQNVYLLHEMLSDLLARNVAFFNKWERDFKFIVIAIKQFLRENDKEKVNEFLNPPDNSKGKKVYFSVSKYKNTVENIDGIHKNFMNLIFLNNKFMNRKIDKMNCAIWVYFRNYIAHFLHLHTKNEKISLISQMNLLIKLFSYDKKVQNHILKSTKTLLEKYNIQINFEISNDKNEVFKYKIKNRLYSKKGKMLGKNNKFEILENEFLENVKAMLEYSE

SEQ ID NO: 843 - protein, 1285 aa, Rhodobacter capsulatus
MQIGKVQGRTISEFGDPAGGLKRKISTDGKNRKELPAHLSSDPKALIGQWISGIDKIYRKPDSRKSDGKAIHSPTPSKMQFDARDDLGEAFWKLVSEAGLAQDSDYDQFKRRLHPYGDKFQPADSGAKLKFEADPPEPQAFHGRWYGAMSKRGNDAKELAAALYEHLHVDEKRIDGQPKRNPKTDKFAPGLVVARALGIESSVLPRGMARLARNWGEEEIQTYFVVDVAASVKEVAKAAVSAAQAFDPPRQVSGRSLSPKVGFALAEHLERVTGSKRCSFDPAAGPSVLALHDEVKKTYKRLCARGKNAARAFPADKTELLALMRHTHENRVRNQMVRMGRVSEYRGQQAGDLAQSHYWTSAGQTEIKESEIFVRLWVGAFALAGRSMKAWIDPMGKIVNTEKNDRDLTAAVNIRQVISNKEMVAEAMARRGIYFGETPELDRLGAEGNEGFVFALLRYLRGCRNQTFHLGARAGFLKEIRKELEKTRWGKAKEAEHVVLTDKTVAAIRAIIDNDAKALGARLLADLSGAFVAHYASKEHFSTLYSEIVKAVKDAPEVSSGLPRLKLLLKRADGVRGYVHGLRDTRKHAFATKLPPPPAPRELDDPATKARYIALLRLYDGPFRAYASGITGTALAGPAARAKEAATALAQSVNVTKAYSDVMEGRSSRLRPPNDGETLREYLSALTGETATEFRVQIGYESDSENARKQAEFIENYRRDMLAFMFEDYIRAKGFDWILKIEPGATAMTRAPVLPEPIDTRGQYEHWQAALYLVMHFVPASDVSNLLHQLRKWEALQGKYELVQDGDATDQADARREALDLVKRFRDVLVLFLKTGEARFEGRAAPFDLKPFRALFANPATFDRLFMATPTTARPAEDDPEGDGASEPELRVARTLRGLRQIARYNHMAVLSDLFAKHKVRDEEVARLAEIEDETQEKSQIVAAQELRTDLHDKVMKCHPKTISPEERQSYAAAIKTIEEHRFLVGRVYLGDHLRLHRLMMDVIGRLIDYAGAYERDTGTFLINASKQLGAGADWAVTIAGAANTDARTQTRKDLAHFNVLDRADGTPDLTALVNRAREMMAYDRKRKNAVPRSILDMLARLGLTLKWQMKDHLLQDATITQAAIKHLDKVRLTVGGPAAVTEARFSQDYLQMVAAVFNGSVQNPKPRRRDDGDAWHKPPKPATAQSQPDQKPPNKAPSAGSRLPPPQVGEVYEGVVVKVIDTGSLGFLAVEGVAGNIGLHISRLRRIREDAIIVGRRYRFRVEIYVPPKSNTSKLNAADLVRID

SEQ ID NO: 844 - protein, 1159 aa, Leptotrichia buccalis
MKVTKVGGISHKKYTSEGRLVKSESEENRTDERLSALLNMRLDMYIKNPSSTETKENQKRIGKLKKFFSNKMVYLKDNTLSLKNGKKENIDREYSETDILESDVRDKKNFAVLKKIYLNENVNSEELEVFRNDIKKKLNKINSLKYSFEKNKANYQKINENNIEKVEGKSKRNIIYDYYRESAKRDAYVSNVKEAFDKLYKEEDIAKLVLEIENLTKLEKYKIREFYHEIIGRKNDKENFAKIIYEEIQNVNNMKELIEKVPDMSELKKSQVFYKYYLDKEELNDKNIKYAFCHFVEIEMSQLLKNYVYKRLSNISNDKIKRIFEYQNLKKLIENKLLNKLDTYVRNCGKYNYYLQDGEIATSDFIARNRQNEAFLRNIIGVSSVAYFSLRNILETENENDITGRMRGKTVKNNKGEEKYVSGEVDKIYNENKKNEVKENLKMFYSYDFNMDNKNEIEDFFANIDEAISSIRHGIVHFNLELEGKDIFAFKNIAPSEISKKMFQNEINEKKLKLKIFRQLNSANVFRYLEKYKILNYLKRTRFEFVNKNIPFVPSFTKLYSRIDDLKNSLGIYWKTPKTNDDNKTKEIIDAQIYLLKNIYYGEFLNYFMSNNGNFFEISKEIIELNKNDKRNLKTGFYKLQKFEDIQEKIPKEYLANIQSLYMINAGNQDEEEKDTYIDFIQKIFLKGFMTYLANNGRLSLIYIGSDEETNTSLAEKKQEFDKFLKKYEQNNNIKIPYEINEFLREIKLGNILKYTERLNMFYLILKLLNHKELTNLKGSLEKYQSANKEEAFSDQLELINLLNLDNNRVTEDFELEADEIGKFLDFNGNKVKDNKELKKFDTNKIYFDGENIIKHRAFYNIKKYGMLNLLEKIADKAGYKISIEELKKYSNKKNEIEKNHKMQENLHRKYARPRKDEKFTDEDYESYKQAIENIEEYTHLKNKVEFNELNLLQGLLLRILHRLVGYTSIWERDLRFRLKGEFPENQYIEEIFNFENKKNVKYKGGQIVEKYIKFYKELHQNDEVKINKYSSANIKVLKQEKKDLYIRNYIAHFNYIPHAEISLLEVLENLRKLLSYDRKLKNAVMKSVVDILKEYGFVATFKIGADKKIGIQTLESEKIVHLKNLKKKKLMTDRNSEELCKLVKIMFEYKMEEKKSEN

SEQ ID NO: 845 - protein, 1389 aa, Leptotrichia shahii
MGNLFGHKRWYEVRDKKDFKIKRKVKVKRNYDGNKYILNINENNNKEKIDNNKFIRKYINYKKNDNILKEFTRKFHAGNILFKLKGKEGIIRIENNDDFLETEEVVLYIEAYGKSEKLKALGITKKKIIDEAIRQGITKDDKKIEIKRQENEEEIEIDIRDEYTNKTLNDCSIILRIIENDELETKKSIYEIFKNINMSLYKIIEKIIENETEKVFENRYYEEHLREKLLKDDKIDVILTNFMEIREKIKSNLEILGFVKFYLNVGGDKKKSKNKKMLVEKILNINVDLTVEDIADFVIKELEFWNITKRIEKVKKVNNEFLEKRRNRTYIKSYVLLDKHEKFKIERENKKDKIVKFFVENIKNNSIKEKIEKILAEFKIDELIKKLEKELKKGNCDTEIFGIFKKHYKVNFDSKKFSKKSDEEKELYKIIYRYLKGRIEKILVNEQKVRLKKMEKIEIEKILNESILSEKILKRVKQYTLEHIMYLGKLRHNDIDMTTVNTDDFSRLHAKEELDLELITFFASTNMELNKIFSRENINNDENIDFFGGDREKNYVLDKKILNSKIKIIRDLDFIDNKNNITNNFIRKFTKIGTNERNRILHAISKERDLQGTQDDYNKVINIIQNLKISDEEVSKALNLDVVFKDKKNIITKINDIKISEENNNDIKYLPSFSKVLPEILNLYRNNPKNEPFDTIETEKIVLNALIYVNKELYKKLILEDDLEENESKNIFLQELKKTLGNIDEIDENIIENYYKNAQISASKGNNKAIKKYQKKVIECYIGYLRKNYEELFDFSDFKMNIQEIKKQIKDINDNKTYERITVKTSDKTIVINDDFEYIISIFALLNSNAVINKIRNRFFATSVWLNTSEYQNIIDILDEIMQLNTLRNECITENWNLNLEEFIQKMKEIEKDFDDFKIQTKKEIFNNYYEDIKNNILTEFKDDINGCDVLEKKLEKIVIFDDETKFEIDKKSNILQDEQRKLSNINKKDLKKKVDQYIKDKDQEIKSKILCRIIFNSDFLKKYKKEIDNLIEDMESENENKFQEIYYPKERKNELYIYKKNLFLNIGNPNFDKIYGLISNDIKMADAKFLFNIDGKNIRKNKISEIDAILKNLNDKLNGYSKEYKEKYIKKLKENDDFFAKNIQNKNYKSFEKDYNRVSEYKKIRDLVEFNYLNKIESYLIDINWKLAIQMARFERDMHYIVNGLRELGIIKLSGYNTGISRAYPKRNGSDGFYTTTAYYKFFDEESYKKFEKICYGFGIDLSENSEINKPENESIRNYISHFYIVRNPFADYSIAEQIDRVSNLLSYSTRYNNSTYASVFEVFKKDVNLDYDELKKKFKLIGNNDILERLMKPKKVSVLELESYNSDYIKNLIIELLTKIENTNDTL

SEQ ID NO: 846 - skipped

SEQ ID NO: 847 - protein, 6 aa, synthetic construct
  VARIANT 2: note = X at position 2 is Leu or Gln.
PXGMTS

SEQ ID NO: 848 - protein, 5 aa, synthetic construct
  VARIANT 2: note = X at position 2 is Leu or Gln.
PXGMT

SEQ ID NO: 849 - protein, 7 aa, synthetic construct
ENLYTQS

SEQ ID NO: 850 - protein, 5 aa, synthetic construct
DDDDK

SEQ ID NO: 851 - protein, 4 aa, synthetic construct
LVPR

SEQ ID NO: 852 - protein, 8 aa, synthetic construct
LEVLFQGP

SEQ ID NO: 853 - protein, 10 aa, synthetic construct
CGLVPAGSGP

SEQ ID NO: 854 - protein, 12 aa, synthetic construct
SLLKSRMVPNFN

SEQ ID NO: 855 - protein, 12 aa, synthetic construct
SLLIARRMPNFN

SEQ ID NO: 856 - protein, 12 aa, synthetic construct
SKLVQASASGVN

SEQ ID NO: 857 - protein, 12 aa, synthetic construct
SSYLKASDAPDN

SEQ ID NO: 858 - protein, 12 aa, synthetic construct
RPKPQQFFGLMN

SEQ ID NO: 859 - protein, 12 aa, synthetic construct
SLRPLALWRSFN

SEQ ID NO: 860 - protein, 12 aa, synthetic construct
SPQGIAGQRNFN

SEQ ID NO: 861 - protein, 14 aa, synthetic construct
DVDERDVRGFASFL

SEQ ID NO: 862 - protein, 12 aa, synthetic construct
SLPLGLWAPNFN

SEQ ID NO: 863 - protein, 12 aa, synthetic construct
SLLIFRSWANFN

SEQ ID NO: 864 - protein, 12 aa, synthetic construct
SGVVIATVIVIT

SEQ ID NO: 865 - protein, 12 aa, synthetic construct
SLGPQGIWGQFN

SEQ ID NO: 866 - protein, 12 aa, synthetic construct
KKSPGRVVGGSV

SEQ ID NO: 867 - protein, 12 aa, synthetic construct
PQGLLGAPGILG

SEQ ID NO: 868 - protein, 31 aa, synthetic construct
HGPEGLRVGFYESDVMGRGHARLVHVEEPHT

SEQ ID NO: 869 - protein, 12 aa, synthetic construct
GPQGLAGQRGIV

SEQ ID NO: 870 - protein, 12 aa, synthetic construct
GGSGQRGRKALE

SEQ ID NO: 871 - protein, 12 aa, synthetic construct
SLSALLSSDIFN

SEQ ID NO: 872 - protein, 12 aa, synthetic construct
SLPRFKIIGGFN

SEQ ID NO: 873 - protein, 12 aa, synthetic construct
SLLGIAVPGNFN

SEQ ID NO: 874 - protein, 12 aa, synthetic construct
FFKNIVTPRTPP

SEQ ID NO: 875 - protein, 5 aa, synthetic construct
HHHHH

SEQ ID NO: 876 - protein, 6 aa, synthetic construct
HHHHHH

SEQ ID NO: 877 - protein, 10 aa, synthetic construct
EQKLISEEDL

SEQ ID NO: 878 - protein, 8 aa, synthetic construct
DYKDDDDK

SEQ ID NO: 879 - protein, 8 aa, synthetic construct
WSHPQFEK

SEQ ID NO: 880 - protein, 9 aa, synthetic construct
YPYDVPDYA

SEQ ID NO: 881 - protein, 5 aa, synthetic construct
RYIRS

SEQ ID NO: 882 - protein, 4 aa, synthetic construct
FHHT

SEQ ID NO: 883 - protein, 17 aa, synthetic construct
WEAAAREACCRECCARA

SEQ ID NO: 884 - protein, 108 aa, synthetic construct
MGVQVETISPGDGRTFPKRGQTCVVHYTGMLEDGKKFDSSRDRNKPFKFMLGKQEVIRGWEEGVAQMSVGQRAKLTISPDYAYGATGHPGIIPPHATLVFDVELLKLE

SEQ ID NO: 885 - protein, 196 aa, synthetic construct
QLVKSELEEKKSELRHKLKYVPHEYIELIEIARNSTQDRILEMKVMEFFMKVYGYRGKHLGGSRKPDGAIYTVGSPIDYGVIVDTKAYSGGYNLPIGQADEMQRYVEENQTRNKHINPNEWWKVYPSSVTEFKFLFVSGHFKGNYKAQLTRLNHITNCNGAVLSVEELLIGGEMIKAGTLTLEEVRRKFNNGEINF

SEQ ID NO: 886 - protein, 167 aa, synthetic construct
MSEVEFSHEYWMRHALTLAKRAWDEREVPVGAVLVHNNRVIGEGWNRPIGRHDPTAHAEIMALRQGGLVMQNYRLIDATLYVTLEPCVMCAGAMIHSRIGRVVFGARDAKTGAAGSLMDVLHHPGMNHRVEITEGILADECAALLSDFFRMRRQEIKAQKKAQSSTD

SEQ ID NO: 887 - protein, 178 aa, synthetic construct
MRRAFITGVFFLSEVEFSHEYWMRHALTLAKRAWDEREVPVGAVLVHNNRVIGEGWNRPIGRHDPTAHAEIMALRQGGLVMQNYRLIDATLYVTLEPCVMCAGAMIHSRIGRVVFGARDAKTGAAGSLMDVLHHPGMNHRVEITEGILADECAALLSDFFRMRRQEIKAQKKAQSSTD

SEQ ID NO: 888 - protein, 150 aa, Staphylococcus aureus
MGSHMTNDIYFMTLAIEEAKKAAQLGEVPIGAIITKDDEVIARAHNLRETLQQPTAHAEHIAIERAAKVLGSWRLEGCTLYVTLEPCVMCAGTIVMSRIPRVVYGADDPKGGCSGSLMNLLQQSNFNHRAIVDKGVLKEACSTLLTTFFK

SEQ ID NO: 889 - protein, 161 aa, Bacillus subtilis
MTQDELYMKEAIKEAKKAEEKGEVPIGAVLVINGEIIARAHNLRETEQRSIAHAEMLVIDEACKALGTWRLEGATLYVTLEPCPMCAGAVVLSRVEKVVFGAFDPKGGCSGTLMNLLQEERFNHQAEVVSGVLEEECGGMLSAFFRELRKKKKAARKNLSE

SEQ ID NO: 890 - protein, 183 aa, Salmonella enterica
MPPAFITGVTSLSDVELDHEYWMRHALTLAKRAWDEREVPVGAVLVHNHRVIGEGWNRPIGRHDPTAHAEIMALRQGGLVLQNYRLLDTTLYVTLEPCVMCAGAMVHSRIGRVVFGARDAKTGAAGSLIDVLHHPGMNHRVEIIEGVLRDECATLLSDFFRMRRQEIKALKKADRAEGAGPAV

SEQ ID NO: 891 - protein, 164 aa, Shewanella putrefaciens
MDEYWMQVAMQMAEKAEAAGEVPVGAVLVKDGQQIATGYNLSISQHDPTAHAEILCLRSAGKKLENYRLLDATLYITLEPCAMCAGAMVHSRIARVVYGARDEKTGAAGTVVNLLQHPAFNHQVEVTSGVLAEACSAQLSRFFKRRRDEKKALKLAQRAQQGIE

SEQ ID NO: 892 - protein, 173 aa, Haemophilus influenzae
MDAAKVRSEFDEKMMRYALELADKAEALGEIPVGAVLVDDARNIIGEGWNLSIVQSDPTAHAEIIALRNGAKNIQNYRLLNSTLYVTLEPCTMCAGAILHSRIKRLVFGASDYKTGAIGSRFHFFDDYKMNHTLEITSGVLAEECSQKLSTFFQKRREEKKIEKALLKSLSDK

SEQ ID NO: 893 - protein, 161 aa, Caulobacter sp.
MRTDESEDQDHRMMRLALDAARAAAEAGETPVGAVILDPSTGEVIATAGNGPIAAHDPTAHAEIAAMRAAAAKLGNYRLTDLTLVVTLEPCAMCAGAISHARIGRVVFGADDPKGGAVVHGPKFFAQPTCHWRPEVTGGVLADESADLLRGFFRARRKAKI

SEQ ID NO: 894 - protein, 179 aa, Geobacter sulfurreducens
MSSLKKTPIRDDAYWMGKAIREAAKAAARDEVPIGAVIVRDGAVIGRGHNLREGSNDPSAHAEMIAIRQAARRSANWRLTGATLYVTLEPCLMCMGAIILARLERVVFGCYDPKGGAAGSLYDLSADPRLNHQVRLSPGVCQEECGTMLSDFFRDLRRRKKAKATPALFIDERKVPPEP

SEQ ID NO: 895 - protein, 198 aa, synthetic construct [sequence omitted]

SEQ ID NO: 896 - protein, 188 aa, synthetic construct
MDSLLMNRRKFLYQFKNVRWAKGRRETYLCYVVKRRDSATSFSLDFGYLRNKNGCHVELLFLRYISDWDLDPGRCYRVTWFTSWSPCYDCARHVADFLRGNPNLSLRIFTARLYFCEDRKAEPEGLRRLHRAGVQIAIMTFKENHERTFKAWEGLHENSVRLSRQLRRILLPLYEVDDLRDAFRTLGL

SEQ ID NO: 897 - protein, 198 aa, synthetic construct [sequence omitted]

SEQ ID NO: 898 - protein, 1367 aa, synthetic construct
DKKYSIGLAIGTNSVGWAVITDEYKVPSKKFKVLGNTDRHSIKKNLIGALLFDSGETAEATRLKRTARRRYTRRKNRICYLQEIFSNEMAKVDDSFFHRLEESFLVEEDKKHERHPIFGNIVDEVAYHEKYPTIYHLRKKLVDSTDKADLRLIYLALAHMIKFRGHFLIEGDLNPDNSDVDKLFIQLVQTYNQLFEENPINASGVDAKAILSARLSKSRRLENLIAQLPGEKKNGLFGNLIALSLGLTPNFKSNFDLAEDAKLQLSKDTYDDDLDNLLAQIGDQYADLFLAAKNLSDAILLSDILRVNTEITKAPLSASMIKRYDEHHQDLTLLKALVRQQLPEKYKEIFFDQSKNGYAGYIDGGASQEEFYKFIKPILEKMDGTEELLVKLNREDLLRKQRTFDNGSIPHQIHLGELHAILRRQEDFYPFLKDNREKIEKILTFRIPYYVGPLARGNSRFAWMTRKSEETITPWNFEEVVDKGASAQSFIERMTAFDKNLPNEKVLPKHSLLYEYFTVYNELTKVKYVTEGMRKPAFLSGEQKKAIVDLLFKTNRKVTVKQLKEDYFKKIECFDSVEISGVEDRFNASLGTYHDLLKIIKDKDFLDNEENEDILEDIVLTLTLFEDREMIEERLKTYAHLFDDKVMKQLKRRRYTGWGALSRKLINGIRDKQSGKTILDFLKSDGFANRNFMALIHDDSLTFKEDIQKAQVSGQGDSLHEHIANLAGSPAIKKGILQTVKVVDELVKVMGRHKPENIVIEMARENQTTQKGQKNSRERMKRIEEGIKELGSQILKEHPVENTQLQNEKLYLYYLQNGRDMYVDQELDINRLSDYDVDHIVPQSFLKDDSIDNKVLTRSDKNRGKSDNVPSEEVVKKMKNYWRQLLNAKLITQRKFDNLTKAERGGLSELDKAGFIKRQLVETRAITKHVAQILDSRMNTKYDENDKLIREVKVITLKSKLVSDFRKDFQFYKVREINNYHHAHDAYLNAVVGTALIKKYPKLESEFVYGDYKVYDVRKMIAKSEQEIGKATAKYFFYSNIMNFFKTEITLANGEIRKRPLIETNGETGEIVWDKGRDFATVRKVLSMPQVNIVKKTEVQTGGFSKESILPKRNSDKLIARKKDWDPKKYGGFDSPTVAYSVLVVAKVEKGKSKKLKSVKELLGITIMERSSFEKNPIDFLEAKGYKEVKKDLIIKLPKYSLFELENGRKRMLASAGELQKGNELALPSKYVNFLYLASHYEKLKGSPEDNEQKQLFVEQHKHYLDEIIEQISEFSKRVILADANLDKVLSAYNKHRDKPIREQAENIIHLFTLTNLGAPAAFKYFDTTIDRKRYTSTKEVLDATLIHQSITGLYETRIDLSQLGGD

SEQ ID NO: 899 - protein, 196 aa, synthetic construct; identical to SEQ ID NO: 885

SEQ ID NO: 900 - protein, 196 aa, synthetic construct; identical to SEQ ID NO: 885

SEQ ID NO: 901 - protein, 167 aa, synthetic construct; identical to SEQ ID NO: 886

SEQ ID NO: 902 - protein, 178 aa, synthetic construct; identical to SEQ ID NO: 887

SEQ ID NO: 903 - protein, 160 aa, Staphylococcus aureus
MGSHMTNDIYFMTLAIEEAKKAAQLGEVPIGAIITKDDEVIARAHNLRETLQQPTAHAEHIAIERAAKVLGSWRLEGCTLYVTLEPCVMCAGTIVMSRIPRVVYGADDPKGGCSGSLMNLLQQSNFNHRAIVDKGVLKEACSTLLTTFFKNLRANKKSTN

SEQ ID NO: 904 - protein, 161 aa, Bacillus subtilis; identical to SEQ ID NO: 889

SEQ ID NO: 905 - protein, 183 aa, Salmonella enterica; identical to SEQ ID NO: 890

SEQ ID NO: 906 - protein, 164 aa, Shewanella putrefaciens; identical to SEQ ID NO: 891

SEQ ID NO: 907 - protein, 173 aa, Haemophilus influenzae; identical to SEQ ID NO: 892

SEQ ID NO: 908 - protein, 161 aa, Caulobacter sp.; identical to SEQ ID NO: 893

SEQ ID NO: 909 - protein, 179 aa, Geobacter sulfurreducens; identical to SEQ ID NO: 894

SEQ ID NO: 910 - protein, 198 aa, synthetic construct [sequence omitted]

SEQ ID NO: 911 - protein, 188 aa, synthetic construct; identical to SEQ ID NO: 896

SEQ ID NO: 912 - protein, 198 aa, synthetic construct [sequence omitted]

SEQ ID NO: 913 - protein, 7 aa, synthetic construct
PKKKRKV

SEQ ID NO: 914 - protein, 16 aa, synthetic construct
KRPAATKKAGQAKKKK

SEQ ID NO: 915 - protein, 9 aa, synthetic construct
PAAKRVKLD

SEQ ID NO: 916 - protein, 11 aa, synthetic construct
RQRRNELKRSP

SEQ ID NO: 917 - protein, 38 aa, synthetic construct
NQSSNFGPMKGGNFGGRSSGPYGGGGQYFAKPRNQGGY

SEQ ID NO: 918 - protein, 42 aa, synthetic construct
RMRIZFKNKGKDTAELRRRRVEVSVELRKAKKDEQILKRRNV

SEQ ID NO: 919 - protein, 8 aa, synthetic construct
VSRKRPRP

SEQ ID NO: 920 - protein, 8 aa, synthetic construct
PPKKARED

SEQ ID NO: 921 - protein, 8 aa, synthetic construct
PQPKKKPL

SEQ ID NO: 922 - protein, 12 aa, synthetic construct
SALIKKKKKMAP

SEQ ID NO: 923 - protein, 5 aa, synthetic construct
DRLRR

SEQ ID NO: 924 - protein, 7 aa, synthetic construct
PKQKKRK

SEQ ID NO: 925 - protein, 10 aa, synthetic construct
RKLKKKIKKL

SEQ ID NO: 926 - protein, 10 aa, synthetic construct
REKKKFLKRR

SEQ ID NO: 927 - protein, 20 aa, synthetic construct
KRKGDEVDGVDEVAKKKSKK

SEQ ID NO: 928 - protein, 17 aa, synthetic construct
RKCLQAGMNLEARKTKK

SEQ ID NO: 929 - protein, 30 aa, synthetic construct
MDSLLMNRRKFLYQFKNVRWAKGRRETYLC

SEQ ID NO: 930 - protein, 11 aa, synthetic construct
YGRKKRRQRRR

SEQ ID NO: 931 - protein, 12 aa, synthetic construct
RRQRRTSKLMKR

SEQ ID NO: 932 - protein, 27 aa, synthetic construct
GWTLNSAGYLLGKINLKALAALAKKIL

SEQ ID NO: 933 - protein, 33 aa, synthetic construct
KALAWEAKLAKALAKALAKHLAKALAKALKCEA

SEQ ID NO: 934 - protein, 16 aa, synthetic construct
RQIKIWFQNRRMKWKK

SEQ ID NO: 935 - protein, 11 aa, synthetic construct
YGRKKRRQRRR

SEQ ID NO: 936 - protein, 9 aa, synthetic construct
RKKRRQRRR

SEQ ID NO: 937 - protein, 11 aa, synthetic construct
YGRKKRRQRRR

SEQ ID NO: 938 - protein, 8 aa, synthetic construct
RKKRRQRR

SEQ ID NO: 939 - protein, 11 aa, synthetic construct
YARAAARQARA

SEQ ID NO: 940 - protein, 11 aa, synthetic construct
THRLPRRRRRR

SEQ ID NO: 941 - protein, 11 aa, synthetic construct
GGRRARRRRRR

SEQ ID NO: 942 - protein, 19 aa, synthetic construct
  VARIANT 1: note = The amino acid at position 1 may be attached to an acyl group.
YGPKKKRKVGGSPKKKRKV

SEQ ID NO: 943 - protein, 16 aa, synthetic construct
GYACGEMGWVRCGGSK

SEQ ID NO: 944 - protein, 10 aa, synthetic construct
YGRRRRRRRR

SEQ ID NO: 945 - protein, 14 aa, synthetic construct
YGRKKRRQRRRPPQ

SEQ ID NO: 946 - protein, 13 aa, synthetic construct
GGGGSGGGGSGGY

SEQ ID NO: 947 - protein, 7 aa, synthetic construct
SSGGGGY

SEQ ID NO: 948 - protein, 4 aa, synthetic construct
RRRY

SEQ ID NO: 949 - protein, 4 aa, synthetic construct
YRRR

SEQ ID NO: 950 - protein, 5 aa, synthetic construct
RRRRY

SEQ ID NO: 951 - protein, 5 aa, synthetic construct
YRRRR

SEQ ID NO: 952 - protein, 4 aa, synthetic construct
EEEY

SEQ ID NO: 953 - protein, 4 aa, synthetic construct
YEEE

SEQ ID NO: 954 - protein, 5 aa, synthetic construct
EEEEY

SEQ ID NO: 955 - protein, 5 aa, synthetic construct
YEEEE

SEQ ID NO: 956 - protein, 7 aa, synthetic construct
ENLYFQG

SEQ ID NO: 957 - protein, 7 aa, synthetic construct
ENLYTQS

SEQ ID NO: 958 - protein, 9 aa, synthetic construct
ENLYFQGGY

SEQ ID NO: 959 - protein, 7 aa, synthetic construct
ENLYFQS

SEQ ID NO: 960 - protein, 11 aa, synthetic construct
  VARIANT 6: note = X is any amino acid and may be repeated 0 to 40 times.
YEEEEXRRRRY

SEQ ID NO: 961 - protein, 11 aa, synthetic construct
  VARIANT 6: note = X is any amino acid and may be repeated from 0 to 40 times.
YDDDDXKKKKY

SEQ ID NO: 962 - protein, 11 aa, synthetic construct
  VARIANT 6: note = X at position 6 may be any amino acid and may be repeated 0 to 40 times.
YKKKKXDDDDY

SEQ ID NO: 963 - protein, 11 aa, synthetic construct
  VARIANT 6: note = X at position 6 may be any amino acid and may be repeated 0 to 40 times.
YRRRRXEEEEY

SEQ ID NO: 964 - protein, 5 aa, synthetic construct
DDDDY

SEQ ID NO: 965 - protein, 4 aa, synthetic construct
KKKY

SEQ ID NO: 966 - protein, 5 aa, synthetic construct
KKKKY

SEQ ID NO: 967 - protein, 8 aa, synthetic construct
GGGGSGGY

SEQ ID NO: 968 - protein, 10 aa, synthetic construct
EAAAKEAAAK

SEQ ID NO: 969 - protein, 8 aa, synthetic construct
EIKRTGGY

SEQ ID NO: 970 - protein, 382 aa, synthetic construct
SLLATVGPTGGVKNRLDIVDFVRDEKFFTLYIRALQAIQDKDQSDYSSFFQLSGIHGLPFTPWAKPKDTPTVPYESGYCTHSQVLFPTWHRVYVSIYEQILQEAAKGIAKKFTVHKKEWAQAAEDLRQPYWDTGFALVPPDEIIKLEQVKITNYDGTKITVRNPILRYSFHPIDPSFNGYPNFDTWKTTVRNPDADKKENIPALIGKLDLEADSTREKTYNMLKFNANWEAFSNHGEFDDTHANSLEAVHDDIHGFVGRGAIRGHMTHALFAAFDPIFWLHHSNVDRHLSLWQALYPGVWVTQGPEREGSMGFAPGTELNKDSALEPFYETEDKPWTSVPLTDTALLNYSYPDFDKVKGGTPDLVRDYINDHIDRRYGIKKS

SEQ ID NO: 971 - protein, 391 aa, synthetic construct
SDKKSLMPLVGIPGEIKNRLNILDFVKNDKFFTLYVRALQVLQARDQSDYSSFFQLGGIHGLPYTEWAKAQPQLHLYKANYCTHGTVLFPTWHRAYESTWEQTLWEAAGTVAQRFTTSDQAEWIQAAKDLRQPFWDWGYWPNDPDFIGLPDQVIRDKQVEITDYNGTKIEVENPILHYKFHPIEPTFEGDFAQWQTTMRYPDVQKQENIEGMIAGIKAAAPGFREWTFNMLTKNYTWELFSNHGAVVGAHANSLEMVHNTVHFLIGRDPTLDPLVPGHMGSVPHAAFDPIFWMHHCNVDRLLALWQTMNYDVYVSEGMNREATMGLIPGQVLTEDSPLEPFYTKNQDPWQSDDLEDWETLGFSYPDFDPVKGKSKEEKSVYINDWVHKHYG

SEQ ID NO: 972 - protein, 305 aa, Bacillus megaterium
MSNKYRVRKNVLHLTDTEKRDFVRTVLILKEKGIYDRYIAWHGAAGKFHTPPGSDRNAAHMSSAFLPWHREYLLRFERDLQSINPEVTLPYWEWETDAQMQDPSQSQIWSADFMGGNGNPIKDFIVDTGPFAAGRWTTIDEQGNPSGGLKRNFGATKEAPTLPTRDDVLNALKITQYDTPPWDMTSQNSFRNQLEGFINGPQLHNRVHRWVGGQMGVVPTAPNDPVFFLHHANVDRIWAVWQIIHRNQNYQPMKNGPFGQNFRDPMYPWNTTPEDVMNHRKLGYVYDIELRKSKRSSLEHHHHHH

SEQ ID NO: 973 - protein, 305 aa, Bacillus megaterium
MSNKYRVRKNVLHLTDTEKRDFVRTVLILKEKGIYDRYIAWHGAAGKFHTPPGSDRNAAHMSSAFLPWHREYLLRFERDLQSINPEVTLPYWEWETDAQMQDPSQSQIWSADFMGGNGNPIKDFIVDTGPFAAGRWTTIDEQGNPSGGLKRNFGATKEAPTLPTRDDVLNALKITQYDTPPWDMTSQNSFRNQLEGAINGPQLHNRVHRWVGGQMGVVPTAPNDPVFFLHHANVDRIWAVWQIIHRNQNYQPMKNGPFGQNFRDPMYPWNTTPEDVMNHRKLGYVYDIELRKSKRSSLEHHHHHH

SEQ ID NO: 974 - protein, 305 aa, Bacillus megaterium
MSNKYRVRKNVLHLTDTEKRDFVRTVLILKEKGIYDRYIAWHGAAGKFHTPPGSDRNAAHMSSAFLPWHREYLLRFERDLQSINPEVTLPYWEWETDAQMQDPSQSQIWSADFMGGNGNPIKDFIVDTGPFAAGRWTTIDEQGNPSGGLKRNFGATKEAPTLPTRDDVLNALKITQYDTPPWDMTSQNSFRNQLEGFINGPQLHNRVHHWVGGQMGVVPTAPNDPVFFLHHANVDRIWAVWQIIHRNQNYQPMKNGPFGQNFRDPMYPWNTTPEDVMNHRKLGYVYDIELRKSKRSSLEHHHHHH

SEQ ID NO: 975 - protein, 305 aa, Bacillus megaterium
MSNKYRVRKNVLHLTDTEKRDFVRTVLILKEKGIYDRYIAWHGAAGKFHTPPGSDRNAAHMSSAFLPWHREYLLRFERDLQSINPEVTLPYWEWETDAQMQDPSQSQIWSADFMGGNGNPIKDFIVDTGPFAAGRWTTIDEQGNPSGGLKRNFGATKEAPTLPTRDDVLNALKITQYDTPPWDMTSQNSFRNQLEGFINGPQLHNRVHRWVGGQMGVGPTAPNDPVFFLHHANVDRIWAVWQIIHRNQNYQPMKNGPFGQNFRDPMYPWNTTPEDVMNHRKLGYVYDIELRKSKRSSLEHHHHHH

SEQ ID NO: 976 - protein, 305 aa, Bacillus megaterium
MSNKYRVRKNVLHLTDTEKRDFVRTVLILKEKGIYDRYIAWHGAAGKFHTPPGSDRNAAHMSSAFLPWHREYLLRFERDLQSINPEVTLPYWEWETDAQMQDPSQSQIWSADFMGGNGNPIKDFIVDTGPFAAGRWTTIDEQGNPSGGLKRNFGATKEAPTLPTRDDVLNALKITQYDTPPWDMTSQNSFRNQLEGFINGPQLHNRVHRWVGGQMGVFPTAPNDPVFFLHHANVDRIWAVWQIIHRNQNYQPMKNGPFGQNFRDPMYPWNTTPEDVMNHRKLGYVYDIELRKSKRSSLEHHHHHH

SEQ ID NO: 977 - protein, 305 aa, Bacillus megaterium
MSNKYRVRKNVLHLTDTEKRDFVRTVLILKEKGIYDRYIAWHGAAGKFHTPPGSDRNAAHMSSAFLPWHREYLLRFERDLQSINPEVTLPYWEWETDAQMQDPSQSQIWSADFMGGNGNPIKDFIVDTGPFAAGRWTTIDEQGNPSGGLKRNFGATKEAPTLPTRDDVLNALKITQYDTPPWDMTSQNSFRNQLEGAINGPQLHNRVHHWVGGQMGVVPTAPNDPVFFLHHANVDRIWAVWQIIHRNQNYQPMKNGPFGQNFRDPMYPWNTTPEDVMNHRKLGYVYDIELRKSKRSSLEHHHHHH

SEQ ID NO: 978 - protein, 305 aa, Bacillus megaterium
MSNKYRVRKNVLHLTDTEKRDFVRTVLILKEKGIYDRYIAWHGAAGKFHTPPGSDRNAAHMSSAFLPWHREYLLRFERDLQSINPEVTLPYWEWETDAQMQDPSQSQIWSADFMGGNGNPIKDFIVDTGPFAAGRWTTIDEQGNPSGGLKRNFGATKEAPTLPTRDDVLNALKITQYDTPPWDMTSQNSFRNQLEGAINGPQLHNRVHRWVGGQMGVGPTAPNDPVFFLHHANVDRIWAVWQIIHRNQNYQPMKNGPFGQNFRDPMYPWNTTPEDVMNHRKLGYVYDIELRKSKRSSLEHHHHHH

SEQ ID NO: 979 - protein, 305 aa, Bacillus megaterium
MSNKYRVRKNVLHLTDTEKRDFVRTVLILKEKGIYDRYIAWHGAAGKFHTPPGSDRNAAHMSSAFLPWHREYLLRFERDLQSINPEVTLPYWEWETDAQMQDPSQSQIWSADFMGGNGNPIKDFIVDTGPFAAGRWTTIDEQGNPSGGLKRNFGATKEAPTLPTRDDVLNALKITQYDTPPWDMTSQNSFRNQLEGAINGPQLHNRVHRWVGGQMGVFPTAPNDPVFFLHHANVDRIWAVWQIIHRNQNYQPMKNGPFGQNFRDPMYPWNTTPEDVMNHRKLGYVYDIELRKSKRSSLEHHHHHH

SEQ ID NO: 980 - protein, 305 aa, Bacillus megaterium
MSNKYRVRKNVLHLTDTEKRDFVRTVLILKEKGIYDRYIAWHGAAGKFHTPPGSDRNAAHMSSAFLPWHREYLLRFERDLQSINPEVTLPYWEWETDAQMQDPSQSQIWSADFMGGNGNPIKDFIVDTGPFAAGRWTTIDEQGNPSGGLKRNFGATKEAPTLPTRDDVLNALKITQYDTPPWDMTSQNSFRNQLEGFINGPQLHNRVHHWVGGQMGVGPTAPNDPVFFLHHANVDRIWAVWQIIHRNQNYQPMKNGPFGQNFRDPMYPWNTTPEDVMNHRKLGYVYDIELRKSKRSSLEHHHHHH

SEQ ID NO: 981 - protein, 305 aa, Bacillus megaterium
MSNKYRVRKNVLHLTDTEKRDFVRTVLILKEKGIYDRYIAWHGAAGKFHTPPGSDRNAAHMSSAFLPWHREYLLRFERDLQSINPEVTLPYWEWETDAQMQDPSQSQIWSADFMGGNGNPIKDFIVDTGPFAAGRWTTIDEQGNPSGGLKRNFGATKEAPTLPTRDDVLNALKITQYDTPPWDMTSQNSFRNQLEGFINGPQLHNRVHHWVGGQMGVFPTAPNDPVFFLHHANVDRIWAVWQIIHRNQNYQPMKNGPFGQNFRDPMYPWNTTPEDVMNHRKLGYVYDIELRKSKRSSLEHHHHHH

SEQ ID NO: 982 - protein, 305 aa, Bacillus megaterium
MSNKYRVRKNVLHLTDTEKRDFVRTVLILKEKGIYDRYIAWHGAAGKFHTPPGSDRNAAHMSSAFLPWHREYLLRFERDLQSINPEVTLPYWEWETDAQMQDPSQSQIWSADFMGGNGNPIKDFIVDTGPFAAGRWTTIDEQGNPSGGLKRNFGATKEAPTLPTRDDVLNALKITQYDTPPWDMTSQNSFRNQLEGAINGPQLHNRVHHWVGGQMGVGPTAPNDPVFFLHHANVDRIWAVWQIIHRNQNYQPMKNGPFGQNFRDPMYPWNTTPEDVMNHRKLGYVYDIELRKSKRSSLEHHHHHH

SEQ ID NO: 983 - protein, 305 aa, Bacillus megaterium
MSNKYRVRKNVLHLTDTEKRDFVRTVLILKEKGIYDRYIAWHGAAGKFHTPPGSDRNAAHMSSAFLPWHREYLLRFERDLQSINPEVTLPYWEWETDAQMQDPSQSQIWSADFMGGNGNPIKDFIVDTGPFAAGRWTTIDEQGNPSGGLKRNFGATKEAPTLPTRDDVLNALKITQYDTPPWDMTSQNSFRNQLEGAINGPQLHNRVHHWVGGQMGVFPTAPNDPVFFLHHANVDRIWAVWQIIHRNQNYQPMKNGPFGQNFRDPMYPWNTTPEDVMNHRKLGYVYDIELRKSKRSSLEHHHHHH

SEQ ID NO: 984 - protein, 305 aa, Bacillus megaterium
MSNKYRVRKNVLHLTDTEKRDFVRTVLILKEKGIYDRYIAWHGAAGKFHTPPGSKRNAAHMSSAFLPWHREYLLRFERDLQSINPEVTLPYWEWETDAQMQDPSQSQIWSADFMGGNGNPIKDFIVDTGPFAAGRWTTIDEQGNPSGGLKRNFGATKEAPTLPTRDDVLNALKITQYDTPPWDMTSQNSFRNQLEGFINGPQLHNRVHRWVGGQMGVVPTAPNDPVFFLHHANVDRIWAVWQIIHRNQNYQPMKNGPFGQNFRDPMYPWNTTPEDVMNHRKLGYVYDIELRKSKRSSLEHHHHHH

SEQ ID NO: 985 - protein, 305 aa, Bacillus megaterium
MSNKYRVRKNVLHLTDTEKRDFVRTVLILKEKGIYDRYIAWHGAAGKFHTPPGSKRNAAHMSSAFLPWHREYLLRFERDLQSINPEVTLPYWEWETDAQMQDPSQSQIWSADFMGGNGNPIKDFIVDTGPFAAGRWTTIDEQGNPSGGLKRNFGATKEAPTLPTRDDVLNALKITQYDTPPWDMTSQNSFRNQLEGAINGPQLHNRVHRWVGGQMGVVPTAPNDPVFFLHHANVDRIWAVWQIIHRNQNYQPMKNGPFGQNFRDPMYPWNTTPEDVMNHRKLGYVYDIELRKSKRSSLEHHHHHH

SEQ ID NO: 986 - protein, 305 aa, Bacillus megaterium
MSNKYRVRKNVLHLTDTEKRDFVRTVLILKEKGIYDRYIAWHGAAGKFHTPPGSKRNAAHMSSAFLPWHREYLLRFERDLQSINPEVTLPYWEWETDAQMQDPSQSQIWSADFMGGNGNPIKDFIVDTGPFAAGRWTTIDEQGNPSGGLKRNFGATKEAPTLPTRDDVLNALKITQYDTPPWDMTSQNSFRNQLEGFINGPQLHNRVHHWVGGQMGVVPTAPNDPVFFLHHANVDRIWAVWQIIHRNQNYQPMKNGPFGQNFRDPMYPWNTTPEDVMNHRKLGYVYDIELRKSKRSSLEHHHHHH

SEQ ID NO: 987 - protein, 305 aa, Bacillus megaterium
MSNKYRVRKNVLHLTDTEKRDFVRTVLILKEKGIYDRYIAWHGAAGKFHTPPGSKRNAAHMSSAFLPWHREYLLRFERDLQSINPEVTLPYWEWETDAQMQDPSQSQIWSADFMGGNGNPIKDFIVDTGPFAAGRWTTIDEQGNPSGGLKRNFGATKEAPTLPTRDDVLNALKITQYDTPPWDMTSQNSFRNQLEGFINGPQLHNRVHRWVGGQMGVGPTAPNDPVFFLHHANVDRIWAVWQIIHRNQNYQPMKNGPFGQNFRDPMYPWNTTPEDVMNHRKLGYVYDIELRKSKRSSLEHHHHHH

SEQ ID NO: 988 - protein, 305 aa, Bacillus megaterium
MSNKYRVRKNVLHLTDTEKRDFVRTVLILKEKGIYDRYIAWHGAAGKFHTPPGSKRNAAHMSSAFLPWHREYLLRFERDLQSINPEVTLPYWEWETDAQMQDPSQSQIWSADFMGGNGNPIKDFIVDTGPFAAGRWTTIDEQGNPSGGLKRNFGATKEAPTLPTRDDVLNALKITQYDTPPWDMTSQNSFRNQLEGFINGPQLHNRVHRWVGGQMGVFPTAPNDPVFFLHHANVDRIWAVWQIIHRNQNYQPMKNGPFGQNFRDPMYPWNTTPEDVMNHRKLGYVYDIELRKSKRSSLEHHHHHH

SEQ ID NO: 989 - protein, 305 aa, Bacillus megaterium
MSNKYRVRKNVLHLTDTEKRDFVRTVLILKEKGIYDRYIAWHGAAGKFHTPPGSKRNAAHMSSAFLPWHREYLLRFERDLQSINPEVTLPYWEWETDAQMQDPSQSQIWSADFMGGNGNPIKDFIVDTGPFAAGRWTTIDEQGNPSGGLKRNFGATKEAPTLPTRDDVLNALKITQYDTPPWDMTSQNSFRNQLEGAINGPQLHNRVHHWVGGQMGVVPTAPNDPVFFLHHANVDRIWAVWQIIHRNQNYQPMKNGPFGQNFRDPMYPWNTTPEDVMNHRKLGYVYDIELRKSKRSSLEHHHHHH

SEQ ID NO: 990 - protein, 305 aa, Bacillus megaterium
MSNKYRVRKNVLHLTDTEKRDFVRTVLILKEKGIYDRYIAWHGAAGKFHTPPGSKRNAAHMSSAFLPWHREYLLRFERDLQSINPEVTLPYWEWETDAQMQDPSQSQIWSADFMGGNGNPIKDFIVDTGPFAAGRWTTIDEQGNPSGGLKRNFGATKEAPTLPTRDDVLNALKITQYDTPPWDMTSQNSFRNQLEGAINGPQLHNRVHRWVGGQMGVGPTAPNDPVFFLHHANVDRIWAVWQIIHRNQNYQPMKNGPFGQNFRDPMYPWNTTPEDVMNHRKLGYVYDIELRKSKRSSLEHHHHHH

SEQ ID NO: 991 - protein, 305 aa, Bacillus megaterium
MSNKYRVRKNVLHLTDTEKRDFVRTVLILKEKGIYDRYIAWHGAAGKFHTPPGSKRNAAHMSSAFLPWHREYLLRFERDLQSINPEVTLPYWEWETDAQMQDPSQSQIWSADFMGGNGNPIKDFIVDTGPFAAGRWTTIDEQGNPSGGLKRNFGATKEAPTLPTRDDVLNALKITQYDTPPWDMTSQNSFRNQLEGAINGPQLHNRVHRWVGGQMGVFPTAPNDPVFFLHHANVDRIWAVWQIIHRNQNYQPMKNGPFGQNFRDPMYPWNTTPEDVMNHRKLGYVYDIELRKSKRSSLEHHHHHH

SEQ ID NO: 992 - protein, 305 aa, Bacillus megaterium
MSNKYRVRKNVLHLTDTEKRDFVRTVLILKEKGIYDRYIAWHGAAGKFHTPPGSKRNAAHMSSAFLPWHREYLLRFERDLQSINPEVTLPYWEWETDAQMQDPSQSQIWSADFMGGNGNPIKDFIVDTGPFAAGRWTTIDEQGNPSGGLKRNFGATKEAPTLPTRDDVLNALKITQYDTPPWDMTSQNSFRNQLEGFINGPQLHNRVHHWVGGQMGVGPTAPNDPVFFLHHANVDRIWAVWQIIHRNQNYQPMKNGPFGQNFRDPMYPWNTTPEDVMNHRKLGYVYDIELRKSKRSSLEHHHHHH

SEQ ID NO: 993 - protein, 305 aa, Bacillus megaterium
MSNKYRVRKNVLHLTDTEKRDFVRTVLILKEKGIYDRYIAWHGAAGKFHTPPGSKRNAAHMSSAFLPWHREYLLRFERDLQSINPEVTLPYWEWETDAQMQDPSQSQIWSADFMGGNGNPIKDFIVDTGPFAAGRWTTIDEQGNPSGGLKRNFGATKEAPTLPTRDDVLNALKITQYDTPPWDMTSQNSFRNQLEGFINGPQLHNRVHHWVGGQMGVFPTAPNDPVFFLHHANVDRIWAVWQIIHRNQNYQPMKNGPFGQNFRDPMYPWNTTPEDVMNHRKLGYVYDIELRKSKRSSLEHHHHHH

SEQ ID NO: 994 - protein, 305 aa, Bacillus megaterium
MSNKYRVRKNVLHLTDTEKRDFVRTVLILKEKGIYDRYIAWHGAAGKFHTPPGSKRNAAHMSSAFLPWHREYLLRFERDLQSINPEVTLPYWEWETDAQMQDPSQSQIWSADFMGGNGNPIKDFIVDTGPFAAGRWTTIDEQGNPSGGLKRNFGATKEAPTLPTRDDVLNALKITQYDTPPWDMTSQNSFRNQLEGAINGPQLHNRVHHWVGGQMGVGPTAPNDPVFFLHHANVDRIWAVWQIIHRNQNYQPMKNGPFGQNFRDPMYPWNTTPEDVMNHRKLGYVYDIELRKSKRSSLEHHHHHH

SEQ ID NO: 995 - protein, 305 aa, Bacillus megaterium
MSNKYRVRKNVLHLTDTEKRDFVRTVLILKEKGIYDRYIAWHGAAGKFHTPPGSKRNAAHMSSAFLPWHREYLLRFERDLQSINPEVTLPYWEWETDAQMQDPSQSQIWSADFMGGNGNPIKDFIVDTGPFAAGRWTTIDEQGNPSGGLKRNFGATKEAPTLPTRDDVLNALKITQYDTPPWDMTSQNSFRNQLEGAINGPQLHNRVHHWVGGQMGVFPTAPNDPVFFLHHANVDRIWAVWQIIHRNQNYQPMKNGPFGQNFRDPMYPWNTTPEDVMNHRKLGYVYDIELRKSKRSSLEHHHHHH

SEQ ID NO: 996 - protein, 305 aa, Bacillus megaterium
MSNKYRVRKNVLHLTDTEKRDFVRTVLILKEKGIYDRYIAWHGAAGKFHTPPGSDRNAAHMSSAFLPWHREYLLRFERDLQSINPEVTLPYWEWETDAQMQDPSQSQIWSADFMGGNGNPIKDFIVDTGPFAAGRWTTIDKQGNPSGGLKRNFGATKEAPTLPTRDDVLNALKITQYDTPPWDMTSQNSFRNQLEGFINGPQLHNRVHRWVGGQMGVVPTAPNDPVFFLHHANVDRIWAVWQIIHRNQNYQPMKNGPFGQNFRDPMYPWNTTPEDVMNHRKLGYVYDIELRKSKRSSLEHHHHHH

SEQ ID NO: 997 - protein, 305 aa, Bacillus megaterium
MSNKYRVRKNVLHLTDTEKRDFVRTVLILKEKGIYDRYIAWHGAAGKFHTPPGSDRNAAHMSSAFLPWHREYLLRFERDLQSINPEVTLPYWEWETDAQMQDPSQSQIWSADFMGGNGNPIKDFIVDTGPFAAGRWTTIDKQGNPSGGLKRNFGATKEAPTLPTRDDVLNALKITQYDTPPWDMTSQNSFRNQLEGAINGPQLHNRVHRWVGGQMGVVPTAPNDPVFFLHHANVDRIWAVWQIIHRNQNYQPMKNGPFGQNFRDPMYPWNTTPEDVMNHRKLGYVYDIELRKSKRSSLEHHHHHH

SEQ ID NO: 998 - protein, 305 aa, Bacillus megaterium
MSNKYRVRKNVLHLTDTEKRDFVRTVLILKEKGIYDRYIAWHGAAGKFHTPPGSDRNAAHMSSAFLPWHREYLLRFERDLQSINPEVTLPYWEWETDAQMQDPSQSQIWSADFMGGNGNPIKDFIVDTGPFAAGRWTTIDKQGNPSGGLKRNFGATKEAPTLPTRDDVLNALKITQYDTPPWDMTSQNSFRNQLEGFINGPQLHNRVHHWVGGQMGVVPTAPNDPVFFLHHANVDRIWAVWQIIHRNQNYQPMKNGPFGQNFRDPMYPWNTTPEDVMNHRKLGYVYDIELRKSKRSSLEHHHHHH

SEQ ID NO: 999 - protein, 305 aa, Bacillus megaterium
MSNKYRVRKNVLHLTDTEKRDFVRTVLILKEKGIYDRYIAWHGAAGKFHTPPGSDRNAAHMSSAFLPWHREYLLRFERDLQSINPEVTLPYWEWETDAQMQDPSQSQIWSADFMGGNGNPIKDFIVDTGPFAAGRWTTIDKQGNPSGGLKRNFGATKEAPTLPTRDDVLNALKITQYDTPPWDMTSQNSFRNQLEGFINGPQLHNRVHRWVGGQMGVGPTAPNDPVFFLHHANVDRIWAVWQIIHRNQNYQPMKNGPFGQNFRDPMYPWNTTPEDVMNHRKLGYVYDIELRKSKRSSLEHHHHHH

SEQ ID NO: 1000 - protein, 305 aa, Bacillus megaterium
MSNKYRVRKNVLHLTDTEKRDFVRTVLILKEKGIYDRYIAWHGAAGKFHTPPGSDRNAAHMSSAFLPWHREYLLRFERDLQSINPEVTLPYWEWETDAQMQDPSQSQIWSADFMGGNGNPIKDFIVDTGPFAAGRWTTIDKQGNPSGGLKRNFGATKEAPTLPTRDDVLNALKITQYDTPPWDMTSQNSFRNQLEGFINGPQLHNRVHRWVGGQMGVFPTAPNDPVFFLHHANVDRIWAVWQIIHRNQNYQPMKNGPFGQNFRDPMYPWNTTPEDVMNHRKLGYVYDIELRKSKRSSLEHHHHHH

SEQ ID NO: 1001 - protein, 305 aa, Bacillus megaterium
MSNKYRVRKNVLHLTDTEKRDFVRTVLILKEKGIYDRYIAWHGAAGKFHTPPGSDRNAAHMSSAFLPWHREYLLRFERDLQSINPEVTLPYWEWETDAQMQDPSQSQIWSADFMGGNGNPIKDFIVDTGPFAAGRWTTIDKQGNPSGGLKRNFGATKEAPTLPTRDDVLNALKITQYDTPPWDMTSQNSFRNQLEGAINGPQLHNRVHHWVGGQMGVVPTAPNDPVFFLHHANVDRIWAVWQIIHRNQNYQPMKNGPFGQNFRDPMYPWNTTPEDVMNHRKLGYVYDIELRKSKRSSLEHHHHHH

SEQ ID NO: 1002 - protein, 305 aa, Bacillus megaterium
MSNKYRVRKNVLHLTDTEKRDFVRTVLILKEKGIYDRYIAWHGAAGKFHTPPGSDRNAAHMSSAFLPWHREYLLRFERDLQSINPEVTLPYWEWETDAQMQDPSQSQIWSADFMGGNGNPIKDFIVDTGPFAAGRWTTIDKQGNPSGGLKRNFGATKEAPTLPTRDDVLNALKITQYDTPPWDMTSQNSFRNQLEGAINGPQLHNRVHRWVGGQMGVGPTAPNDPVFFLHHANVDRIWAVWQIIHRNQNYQPMKNGPFGQNFRDPMYPWNTTPEDVMNHRKLGYVYDIELRKSKRSSLEHHHHHH

SEQ ID NO: 1003 - protein, 305 aa, Bacillus megaterium
MSNKYRVRKNVLHLTDTEKRDFVRTVLILKEKGIYDRYIAWHGAAGKFHTPPGSDRNAAHMSSAFLPWHREYLLRFERDLQSINPEVTLPYWEWETDAQMQDPSQSQIWSADFMGGNGNPIKDFIVDTGPFAAGRWTTIDKQGNPSGGLKRNFGATKEAPTLPTRDDVLNALKITQYDTPPWDMTSQNSFRNQLEGAINGPQLHNRVHRWVGGQMGVFPTAPNDPVFFLHHANVDRIWAVWQIIHRNQNYQPMKNGPFGQNFRDPMYPWNTTPEDVMNHRKLGYVYDIELRKSKRSSLEHHHHHH

SEQ ID NO: 1004 - protein, 305 aa, Bacillus megaterium
MSNKYRVRKNVLHLTDTEKRDFVRTVLILKEKGIYDRYIAWHGAAGKFHTPPGSDRNAAHMSSAFLPWHREYLLRFERDLQSINPEVTLPYWEWETDAQMQDPSQSQIWSADFMGGNGNPIKDFIVDTGPFAAGRWTTIDKQGNPSGGLKRNFGATKEAPTLPTRDDVLNALKITQYDTPPWDMTSQNSFRNQLEGFINGPQLHNRVHHWVGGQMGVGPTAPNDPVFFLHHANVDRIWAVWQIIHRNQNYQPMKNGPFGQNFRDPMYPWNTTPEDVMNHRKLGYVYDIELRKSKRSSLEHHHHHH

SEQ ID NO: 1005 - protein, 305 aa, Bacillus megaterium
MSNKYRVRKNVLHLTDTEKRDFVRTVLILKEKGIYDRYIAWHGAAGKFHTPPGSDRNAAHMSSAFLPWHREYLLRFERDLQSINPEVTLPYWEWETDAQMQDPSQSQIWSADFMGGNGNPIKDFIVDTGPFAAGRWTTIDKQGNPSGGLKRNFGATKEAPTLPTRDDVLNALKITQYDTPPWDMTSQNSFRNQLEGFINGPQLHNRVHHWVGGQMGVFPTAPNDPVFFLHHANVDRIWAVWQIIHRNQNYQPMKNGPFGQNFRDPMYPWNTTPEDVMNHRKLGYVYDIELRKSKRSSLEHHHHHH

SEQ ID NO: 1006 - protein, 305 aa, Bacillus megaterium
MSNKYRVRKNVLHLTDTEKRDFVRTVLILKEKGIYDRYIAWHGAAGKFHTPPGSDRNAAHMSSAFLPWHREYLLRFERDLQSINPEVTLPYWEWETDAQMQDPSQSQIWSADFMGGNGNPIKDFIVDTGPFAAGRWTTIDKQGNPSGGLKRNFGATKEAPTLPTRDDVLNALKITQYDTPPWDMTSQNSFRNQLEGAINGPQLHNRVHHWVGGQMGVGPTAPNDPVFFLHHANVDRIWAVWQIIHRNQNYQPMKNGPFGQNFRDPMYPWNTTPEDVMNHRKLGYVYDIELRKSKRSSLEHHHHHH

SEQ ID NO: 1007 - protein, 305 aa, Bacillus megaterium
MSNKYRVRKNVLHLTDTEKRDFVRTVLILKEKGIYDRYIAWHGAAGKFHTPPGSDRNAAHMSSAFLPWHREYLLRFERDLQSINPEVTLPYWEWETDAQMQDPSQSQIWSADFMGGNGNPIKDFIVDTGPFAAGRWTTIDKQGNPSGGLKRNFGATKEAPTLPTRDDVLNALKITQYDTPPWDMTSQNSFRNQLEGAINGPQLHNRVHHWVGGQMGVFPTAPNDPVFFLHHANVDRIWAVWQIIHRNQNYQPMKNGPFGQNFRDPMYPWNTTPEDVMNHRKLGYVYDIELRKSKRSSLEHHHHHH

SEQ ID NO: 1008 - protein, 305 aa, Bacillus megaterium
MSNKYRVRKNVLHLTDTEKRDFVRTVLILKEKGIYDRYIAWHGAAGKFHTPPGSKRNAAHMSSAFLPWHREYLLRFERDLQSINPEVTLPYWEWETDAQMQDPSQSQIWSADFMGGNGNPIKDFIVDTGPFAAGRWTTIDKQGNPSGGLKRNFGATKEAPTLPTRDDVLNALKITQYDTPPWDMTSQNSFRNQLEGFINGPQLHNRVHRWVGGQMGVVPTAPNDPVFFLHHANVDRIWAVWQIIHRNQNYQPMKNGPFGQNFRDPMYPWNTTPEDVMNHRKLGYVYDIELRKSKRSSLEHHHHHH

SEQ ID NO: 1009 - protein, 305 aa, Bacillus megaterium
MSNKYRVRKNVLHLTDTEKRDFVRTVLILKEKGIYDRYIAWHGAAGKFHTPPGSKRNAAHMSSAFLPWHREYLLRFERDLQSINPEVTLPYWEWETDAQMQDPSQSQIWSADFMGGNGNPIKDFIVDTGPFAAGRWTTIDKQGNPSGGLKRNFGATKEAPTLPTRDDVLNALKITQYDTPPWDMTSQNSFRNQLEGAINGPQLHNRVHRWVGGQMGVVPTAPNDPVFFLHHANVDRIWAVWQIIHRNQNYQPMKNGPFGQNFRDPMYPWNTTPEDVMNHRKLGYVYDIELRKSKRSSLEHHHHHH

SEQ ID NO: 1010 - protein, 305 aa, Bacillus megaterium
MSNKYRVRKNVLHLTDTEKRDFVRTVLILKEKGIYDRYIAWHGAAGKFHTPPGSKRNAAHMSSAFLPWHREYLLRFERDLQSINPEVTLPYWEWETDAQMQDPSQSQIWSADFMGGNGNPIKDFIVDTGPFAAGRWTTIDKQGNPSGGLKRNFGATKEAPTLPTRDDVLNALKITQYDTPPWDMTSQNSFRNQLEGFINGPQLHNRVHHWVGGQMGVVPTAPNDPVFFLHHANVDRIWAVWQIIHRNQNYQPMKNGPFGQNFRDPMYPWNTTPEDVMNHRKLGYVYDIELRKSKRSSLEHHHHHH

SEQ ID NO: 1011 - protein, 305 aa, Bacillus megaterium
MSNKYRVRKNVLHLTDTEKRDFVRTVLILKEKGIYDRYIAWHGAAGKFHTPPGSKRNAAHMSSAFLPWHREYLLRFERDLQSINPEVTLPYWEWETDAQMQDPSQSQIWSADFMGGNGNPIKDFIVDTGPFAAGRWTTIDKQGNPSGGLKRNFGATKEAPTLPTRDDVLNALKITQYDTPPWDMTSQNSFRNQLEGFINGPQLHNRVHRWVGGQMGVGPTAPNDPVFFLHHANVDRIWAVWQIIHRNQNYQPMKNGPFGQNFRDPMYPWNTTPEDVMNHRKLGYVYDIELRKSKRSSLEHHHHHH

SEQ ID NO: 1012 - protein, 305 aa, Bacillus megaterium
MSNKYRVRKNVLHLTDTEKRDFVRTVLILKEKGIYDRYIAWHGAAGKFHTPPGSKRNAAHMSSAFLPWHREYLLRFERDLQSINPEVTLPYWEWETDAQMQDPSQSQIWSADFMGGNGNPIKDFIVDTGPFAAGRWTTIDKQGNPSGGLKRNFGATKEAPTLPTRDDVLNALKITQYDTPPWDMTSQNSFRNQLEGFINGPQLHNRVHRWVGGQMGVFPTAPNDPVFFLHHANVDRIWAVWQIIHRNQNYQPMKNGPFGQNFRDPMYPWNTTPEDVMNHRKLGYVYDIELRKSKRSSLEHHHHHH

SEQ ID NO: 1013 - protein, 305 aa, Bacillus megaterium
MSNKYRVRKNVLHLTDTEKRDFVRTVLILKEKGIYDRYIAWHGAAGKFHTPPGSKRNAAHMSSAFLPWHREYLLRFERDLQSINPEVTLPYWEWETDAQMQDPSQSQIWSADFMGGNGNPIKDFIVDTGPFAAGRWTTIDKQGNPSGGLKRNFGATKEAPTLPTRDDVLNALKITQYDTPPWDMTSQNSFRNQLEGAINGPQLHNRVHHWVGGQMGVVPTAPNDPVFFLHHANVDRIWAVWQIIHRNQNYQPMKNGPFGQNFRDPMYPWNTTPEDVMNHRKLGYVYDIELRKSKRSSLEHHHHHH

SEQ ID NO: 1014 - protein, 305 aa, Bacillus megaterium
MSNKYRVRKNVLHLTDTEKRDFVRTVLILKEKGIYDRYIAWHGAAGKFHTPPGSKRNAAHMSSAFLPWHREYLLRFERDLQSINPEVTLPYWEWETDAQMQDPSQSQIWSADFMGGNGNPIKDFIVDTGPFAAGRWTTIDKQGNPSGGLKRNFGATKEAPTLPTRDDVLNALKITQYDTPPWDMTSQNSFRNQLEGAINGPQLHNRVHRWVGGQMGVGPTAPNDPVFFLHHANVDRIWAVWQIIHRNQNYQPMKNGPFGQNFRDPMYPWNTTPEDVMNHRKLGYVYDIELRKSKRSSLEHHHHHH

SEQ ID NO: 1015 - protein, 305 aa, Bacillus megaterium
MSNKYRVRKNVLHLTDTEKRDFVRTVLILKEKGIYDRYIAWHGAAGKFHTPPGSKRNAAHMSSAFLPWHREYLLRFERDLQSINPEVTLPYWEWETDAQMQDPSQSQIWSADFMGGNGNPIKDFIVDTGPFAAGRWTTIDKQGNPSGGLKRNFGATKEAPTLPTRDDVLNALKITQYDTPPWDMTSQNSFRNQLEGAINGPQLHNRVHRWVGGQMGVFPTAPNDPVFFLHHANVDRIWAVWQIIHRNQNYQPMKNGPFGQNFRDPMYPWNTTPEDVMNHRKLGYVYDIELRKSKRSSLEHHHHHH

SEQ ID NO: 1016 - protein, 305 aa, Bacillus megaterium
MSNKYRVRKNVLHLTDTEKRDFVRTVLILKEKGIYDRYIAWHGAAGKFHTPPGSKRNAAHMSSAFLPWHREYLLRFERDLQSINPEVTLPYWEWETDAQMQDPSQSQIWSADFMGGNGNPIKDFIVDTGPFAAGRWTTIDKQGNPSGGLKRNFGATKEAPTLPTRDDVLNALKITQYDTPPWDMTSQNSFRNQLEGFINGPQLHNRVHHWVGGQMGVGPTAPNDPVFFLHHANVDRIWAVWQIIHRNQNYQPMKNGPFGQNFRDPMYPWNTTPEDVMNHRKLGYVYDIELRKSKRSSLEHHHHHH

SEQ ID NO: 1017 - protein, 305 aa, Bacillus megaterium
MSNKYRVRKNVLHLTDTEKRDFVRTVLILKEKGIYDRYIAWHGAAGKFHTPPGSKRNAAHMSSAFLPWHREYLLRFERDLQSINPEVTLPYWEWETDAQMQDPSQSQIWSADFMGGNGNPIKDFIVDTGPFAAGRWTTIDKQGNPSGGLKRNFGATKEAPTLPTRDDVLNALKITQYDTPPWDMTSQNSFRNQLEGFINGPQLHNRVHHWVGGQMGVFPTAPNDPVFFLHHANVDRIWAVWQIIHRNQNYQPMKNGPFGQNFRDPMYPWNTTPEDVMNHRKLGYVYDIELRKSKRSSLEHHHHHH

SEQ ID NO: 1018 - protein, 305 aa, Bacillus megaterium
MSNKYRVRKNVLHLTDTEKRDFVRTVLILKEKGIYDRYIAWHGAAGKFHTPPGSKRNAAHMSSAFLPWHREYLLRFERDLQSINPEVTLPYWEWETDAQMQDPSQSQIWSADFMGGNGNPIKDFIVDTGPFAAGRWTTIDKQGNPSGGLKRNFGATKEAPTLPTRDDVLNALKITQYDTPPWDMTSQNSFRNQLEGAINGPQLHNRVHHWVGGQMGVGPTAPNDPVFFLHHANVDRIWAVWQIIHRNQNYQPMKNGPFGQNFRDPMYPWNTTPEDVMNHRKLGYVYDIELRKSKRSSLEHHHHHH

SEQ ID NO: 1019 - protein, 305 aa, Bacillus megaterium
MSNKYRVRKNVLHLTDTEKRDFVRTVLILKEKGIYDRYIAWHGAAGKFHTPPGSKRNAAHMSSAFLPWHREYLLRFERDLQSINPEVTLPYWEWETDAQMQDPSQSQIWSADFMGGNGNPIKDFIVDTGPFAAGRWTTIDKQGNPSGGLKRNFGATKEAPTLPTRDDVLNALKITQYDTPPWDMTSQNSFRNQLEGAINGPQLHNRVHHWVGGQMGVFPTAPNDPVFFLHHANVDRIWAVWQIIHRNQNYQPMKNGPFGQNFRDPMYPWNTTPEDVMNHRKLGYVYDIELRKSKRSSLEHHHHHH

SEQ ID NO: 1020 - protein, 5 aa, synthetic construct
GYGGS

SEQ ID NO: 1021 - protein, 5 aa, synthetic construct
MYGGS

SEQ ID NO: 1022 - protein, 5 aa, synthetic construct
SFGFP

SEQ ID NO: 1023 - protein, 5 aa, synthetic construct
GGGGY

SEQ ID NO: 1024 - protein, 5 aa, synthetic construct
RGGGY

SEQ ID NO: 1025 - protein, 5 aa, synthetic construct
RGRGY

SEQ ID NO: 1026 - protein, 5 aa, synthetic construct
RRRGY

SEQ ID NO: 1027 - protein, 5 aa, synthetic construct
RRRRY

SEQ ID NO: 1028 - protein, 5 aa, synthetic construct
EGGGY

SEQ ID NO: 1029 - protein, 5 aa, synthetic construct
EGEGY

SEQ ID NO: 1030 - protein, 5 aa, synthetic construct
EEEGY

SEQ ID NO: 1031 - protein, 5 aa, synthetic construct
EEEEY

SEQ ID NO: 1032 - protein, 5 aa, synthetic construct
GGGWY

SEQ ID NO: 1033 - protein, 5 aa, synthetic construct
GGWGY

SEQ ID NO: 1034 - protein, 5 aa, synthetic construct
RRRWY

SEQ ID NO: 1035 - protein, 5 aa, synthetic construct
RRWRY

SEQ ID NO: 1036 - protein, 5 aa, synthetic construct
EEEWY

SEQ ID NO: 1037 - protein, 5 aa, synthetic construct
EEWEY

SEQ ID NO: 1038 - protein, 15 aa, synthetic construct
GGFMTSEKSQTPLVT

SEQ ID NO: 1039 - protein, 6 aa, synthetic construct
SGGGGY

SEQ ID NO: 1040 - protein, 7 aa, synthetic construct
KKVDGLP

SEQ ID NO: 1041 - protein, 18 aa, synthetic construct
GGGGSGGGGSGGGGSGGY

SEQ ID NO: 1042 - protein, 15 aa, synthetic construct
AEAAAKEAAAKAGGY

SEQ ID NO: 1043 - protein, 9 aa, synthetic construct
APAPAPGGY

SEQ ID NO: 1044 - protein, 24 aa, synthetic construct
ANNNNNNNNNNNNNNNNNNNNGGY

SEQ ID NO: 1045 - protein, 8 aa, synthetic construct
EIKRTGGY

SEQ ID NO: 1046 - protein, 23 aa, synthetic construct
ANNNNNNNNNNNNNNNNNNNNGG

SEQ ID NO: 1047 - protein, 10 aa, synthetic construct
APAPAPAPGY

SEQ ID NO: 1048 - protein, 244 aa, synthetic construct
MHHHHHHRKGEELFTGVVPILVELDGDVNGHKFSVRGEGEGDATNGKLTLKFICTTGKLPVPWPTLVTTLTYGVQCFARYPDHMKQHDFFKSAMPEGYVQERTISFKDDGTYKTRAEVKFEGDTLVNRIELKGIDFKEDGNILGHKLEYNFNSHNVYITADKQKNGIKANFKIRHNVEDGSVQLADHYQQNTPIGDGPVLLPDNHYLSTQSVLSKDPNEKRDHMVLLEFVTAAGITHGMDELYK

SEQ ID NO: 1049 - protein, 387 aa, synthetic construct
MHHHHHHGGSGGSDYKDDDDKKIEEGKLVIWINGDKGYNGLAEVGKKFEKDTGIKVTVEHPDKLEEKFPQVAATGDGPDIIFWAHDRFGGYAQSGLLAEITPDKAFQDKLYPFTWDAVRYNGKLIAYPIAVEALSLIYNKDLLPNPPKTWEEIPALDKELKAKGKSALMFNLQEPYFTWPLIAADGGYAFKYENGKYDIKDVGVDNAGAKAGLTFLVDLIKNKHMNADTDYSIAEAAFNKGETAMTINGPWAWSNIDTSKVNYGVTVLPTFKGQPSKPFVGVLSAGINAASPNKELAKEFLENYLLTDEGLEAVNKDKPLGAVALKSYEEELAKDPRIAATMENAQKGEIMPNIPQMSAFWYAVRTAVINAASGRQTVDEALKDAQT

SEQ ID NO: 1050 - protein, 266 aa, synthetic construct
MKYLLPTAAAGLLLLAAQPAMAEVQLVESGGGLVQPGGSLRLSCAASGFNIKDTYIHWVRQAPGKGLEWVARIYPTNGYTRYADSVKGRFTISADTSKNTAYLQMNSLRAEDTAVYYCSRWGGDGFYAMDYWGQGTLVTVSSGGGGSGGGGSGGGGSDIQMTQSPSSLSASVGDRVTITCRASQDVNTAVAWYQQKPGKAPKLLIYSASFLYSGVPSRFSGSRSGTDFTLTISSLQPEDFATYYCQQHYTTPPTFGQGTKLEIKRT

SEQ ID NO: 1051 - protein, 371 aa, synthetic construct
MHHHHHHKEETPETPETDSEEEVTIKANLIFANGSTQTAEFKGTFEKATSEAYAYADTLKKDNGEYTVDVADKGYTLNIKFAGKEKTPEEPKEEVTIKANLIYADGKTQTAEFKGTFEEATAEAYRYADALKKDNGEYTVDVADKGYTLNIKFAGKEKTPEEPKEEVTIKANLIYADGKTQTAEFKGTFEEATAEAYRYADLLAKENGKYTVDVADKGYTLNIKFAGKEKTPEEPKEEVTIKANLIYADGKTQTAEFKGTFAEATAEAYRYADLLAKENGKYTADLEDGGYTINIRFAGKKVDEKPEEKEQVTIKENIYFEDGTVQTATFKGTFAEATAEAYRYADLLSKEHGKYTADLEDGGYTINIRFA

SEQ ID NO: 1052 - protein, 305 aa, Bacillus megaterium; identical to SEQ ID NO: 972

SEQ ID NO: 1053 - skipped

SEQ ID NO: 1054 - protein, 4 aa, synthetic construct
CGGC

SEQ ID NO: 1055 - protein, 5 aa, synthetic construct
CGGGC

SEQ ID NO: 1056-1057 - skipped (2 entries)

SEQ ID NO: 1058 - protein, 4 aa, synthetic construct
NNNY

SEQ ID NO: 1059 - protein, 6 aa, synthetic construct
GGYNNN

SEQ ID NO: 1060 - protein, 11 aa, synthetic construct
APAPAPAPGGY
